(19) United States
(12) Patent Application Publication
(10) Pub. No.: US 2012/0244155 A1
(43) Pub. Date: Sep. 27, 2012

(54) Dendritic Cells (DCs) Targeting for Tuberculosis (TB) Vaccine

(75) Inventors: Patrick Lecine, Dallas, TX (US); Yves Levy, Paris (FR); Gerard Zurawski, Midlothian, TX (US); Jacques F. Banchereau, Montclair, NJ (US)

(73) Assignees: BAYLOR RESEARCH INSTITUTE, Dallas, TX (US); Agence Nationale de Recherches Sur le Sida, Paris (FR); Institut National de la Sante et de la Recherche Medicale (INSERM), Paris (FR)

(21) Appl. No.: 13/424,582

(22) Filed: Mar. 20, 2012

Related U.S. Application Data
(60) Provisional application No. 61/466,292, filed on Mar. 22, 2011.

(51) Int. Cl. A61K 39/395; A61P 37/04; C12N 5/078

(52) U.S. Cl. 424/134.1; 435/375; 424/178.1

(57) ABSTRACT

Compositions and methods comprising high affinity monoclonal antibody conjugates against several DC receptors are described herein. The inventors prepared fusion proteins with antigens for DC-targeting vaccine generation by conjugating several M. tuberculosis protein antigens with high affinity monoclonal antibodies against several DC receptors with a view to developing novel human vaccines based on in vivo DC-targeting. The findings of studies described herein indicate that vaccines bearing TB antigens can recall a potent memory antigen-specific T cell response in vitro resulting in IFNγ secretion.

### CROSS-REFERENCE TO RELATED APPLICATIONS

[0001] This application claims priority to U.S. Provisional Application Ser. No. 61/466,292, filed Mar. 22, 2011, the entire contents of which are incorporated herein by reference.

### TECHNICAL FIELD OF THE INVENTION

[0002] The present invention relates in general to tuberculosis (TB) treatment and control, and more particularly, to a composition and a method of developing a TB vaccine by targeting antigens to human dendritic cells and their subtypes.

### STATEMENT OF FEDERALLY FUNDED RESEARCH

[0003] None.

### REFERENCE TO A SEQUENCE LISTING

[0004] The present application includes a Sequence Listing which has been submitted in ASCII format via EFS-Web and is hereby incorporated by reference in its entirety. Said ASCII copy, created on Mar. 12, 2012, is named BHCS1119.txt and is 882,499 bytes in size.

### BACKGROUND OF THE INVENTION

[0005] Without limiting the scope of the invention, its background is described in connection with design of fusion proteins and targeting antigens to dendritic cells (DCs) for the purpose of vaccination and to evoke potent humoral and cellular immune responses.

[0006] U.S. Patent Application No. 20040146948 (Britton et al. 2003) provides single-chain Fv (scFv) fragment-based compositions and methods for targeting antigens (including Mycobacterial antigens) to antigen-presenting cells (APCs) such as, for example, dendritic cells (DC). The Britton invention further discloses compositions and methods useful in the treatment of diseases including infectious diseases and cancer.

[0007] U.S. Pat. No. 7,560,534 issued to Deo et al. (2009) describes molecular conjugates comprising an antigen linked to a human monoclonal antibody that specifically binds to dendritic cells. The '534 patent further discloses pharmaceutical compositions comprising the molecular conjugates and therapeutic methods for using the conjugates.

[0008] U.S. Pat. No. 7,261,897 issued to Skeiky et al. (2007) relates to compositions and fusion proteins containing at least two Mycobacterium sp. antigens, and nucleic acids encoding such compositions and fusion proteins. The compositions of the Skeiky invention increase serological sensitivity of sera from individuals infected with tuberculosis, and methods for their use in the diagnosis, treatment, and prevention of tuberculosis infection.

### SUMMARY OF THE INVENTION

[0009] The present invention describes a tuberculosis (TB) vaccine comprising selected TB proteins domains fused to heavy and light chain of antibodies that is used to target and activate dendritic cells (DCs). The vaccine composition described herein delivers antigen specifically to DCs for the purpose of vaccination to evoke potent humoral and cellular immune responses. The vaccine composition of the present invention promotes efficient recall memory induced in blood from TB patients. Targeting. DCs with TB-antigen fused to anti-DC antibodies enables recognition of both human and monkey proteins.

[0010] A method for increasing the effectiveness of antigen presentation by an antigen presenting cell (APC) is disclosed in one embodiment of the present invention. The method of the present invention comprises the steps of: isolating and purifying a dendritic cell (DC)-specific antibody or fragment thereof to which one or more antigens or recombinant antigens are attached or conjugated to form an antibody-antigen complex, and contacting the APC with the antibody-antigen complex under conditions wherein the antibody-antigen complex is processed and presented for T cell recognition.

[0011] In one aspect of the method described hereinabove the APC comprises an isolated dendritic cell (DC), a peripheral blood mononuclear cell (PBMC), a monocyte, a B cell, a myeloid dendritic cell and combinations thereof that have been cultured in vitro with GM-CSF and IL-4, interferon alpha, antigen and combinations thereof. In one aspect, the one or more antigens or recombinant antigens comprise M. tuberculosis antigens comprises at least one of SEQ ID NOS: 1, 2, 3, 4, 5, 71 to 135, 137, 139, 141, 143, 145, 147, 149, 151, 153, 155, 157, 159, 161, 163, 165, 167, 169, 171, 173, 175, 177, 179, 181, 183, 185, 187, 189, 191, 193, 195, 197, 199, 201, 203, 205, 207, 209, 211, 213, 215, 217, 219, or 211. In another aspect, the DC-specific antibody or fragment is selected from an anti-DCIR, αDCIR, MHC class I, MHC class II, CD1, CD2, CD3, CD4, CD8, CD11b, CD14, CD15, CD16, CD19, CD20, CD29, CD31, αCD40, CD43, CD44, CD45, CD54, CD56, CD57, CD58, CD83, CD86, CMRF-44, CMRF-56, DCIR DC-ASPGR, CLEC-6, CD40, BDCA-2, MARCO, DEC-205, mannose receptor, αLangerin, DECTIN-1, B7-1, B7-2, IFN-γ receptor and IL-2 receptor, ICAM-1, Fcγ receptor, αLOX-1 or ASPGR. In another aspect, the method of claim 1, wherein a nucleotide sequence for the DC-specific antibody or the antigen is selected from SEQ ID NOS: 6 to 70, 136, 138, 140, 142, 144, 146, 148, 150, 152, 154, 156, 158, 160, 162, 164, 166, 168, 170, 172, 174, 176, 178, 180, 182, 184, 186, 188, 190, 192, 194, 196, 198, 200, 202, 204, 206, 208, 210, 212, 214, 216, 218, or 220.

[0012] Another embodiment described herein relates to an immunostimulatory composition for generating an immune response, for prophylaxis, for therapy or any combination thereof against tuberculosis in a human or animal subject comprising: (i) an anti-dendritic cell (DC)-specific antibody or fragment thereof fused or conjugated to at least a portion of one or more M. tuberculosis antigens or antigenic peptides and (ii) a pharmaceutically acceptable carrier, wherein the conjugate is comprised in an amount effective to generate the immune response against tuberculosis. In one aspect of the composition the one or more M. tuberculosis antigens are selected from the group consisting of SEQ ID NOS: 1, 2, 3, 4, 5, 71 to 135, 137, 139, 141, 143, 145, 147, 149, 151, 153, 155, 157, 159, 161, 163, 165, 167, 169, 171, 173, 175, 177, 179, 181, 183, 185, 187, 189, 191, 193, 195, 197, 199, 201, 203, 205, 207, 209, 211, 213, 215, 217, 219, or 211, and any combinations thereof. In another aspect the DC-specific antibody or fragment is selected from an anti-DCIR, αDCIR, MHC class I, MHC class II, CD1, CD2, CD3, CD4, CD8, CD11b, CD14, CD15, CD16, CD19, CD20, CD29, CD31, αCD40, CD43, CD44, CD45, CD54, CD56, CD57, CD58, CD83, CD86, CMRF-44, CMRF-56, DCIR, DC-ASPGR, CLEC-6, CD40, BDCA-2, MARCO, DEC-205, mannose receptor, αLangerin, DECTIN-1, B7-1, B7-2, IFN-γ receptor and IL-2 receptor, ICAM-1, Fcγ receptor, αLOX-1 or ASPGR. In yet another aspect the DC-specific antibody or fragment comprises αDCIR, αLangerin, αLOX-1 or αCD40. In a related aspect the DC-specific antibody is humanized. In another aspect the composition is administered to the human or animal subject by an oral route, a nasal route, topically or as an injection, wherein the injection is selected from the group consisting of subcutaneous, intravenous, intraperitoneal:

[0013] In yet another embodiment the instant invention discloses a vaccine composition comprising: an anti-dendritic cell (DC)-specific antibody or fragment thereof fused or conjugated to at least a portion of one or more recombinant or natural M. tuberculosis antigens or antigenic peptides, wherein the antigenic peptides are representative of one or more epitopes of the one or more antigens implicated in tuberculosis and an optional pharmaceutically acceptable carrier or an adjuvant. The vaccine composition of the present invention further comprises a flexible linker between the DC-specific antibody or fragment thereof and the one or more antigens, wherein the one or more antigens or antigenic peptides are conjugated to a heavy-chain, a light-chain or both of the anti-dendritic cell (DC)-specific antibody.

[0014] In one aspect of the vaccine composition the one or more M. tuberculosis antigens are selected from the group consisting of SEQ ID NO: 1, SEQ ID NO: 2, SEQ ID NO: 3, SEQ ID NO: 4, SEQ ID NO: 5, and any combinations thereof. In another aspect the DC-specific antibody or fragment is selected from an anti-DCIR, αDCIR, MHC class I, MHC class II, CD1, CD2, CD3, CD4, CD8, CD11b, CD14, CD15, CD16, CD19, CD20, CD29, CD31, αCD40, CD43, CD44, CD45, CD54, CD56, CD57, CD58, CD83, CD86, CMRF-44, CMRF-56, DCIR, DC-ASPGR, CLEC-6, CD40, BDCA-2, MARCO, DEC-205, mannose receptor, αLangerin, DECTIN-1, B7-1, B7-2, IFN-γ receptor and IL-2 receptor, ICAM-1, Fcγ receptor, αLOX-1 or ASPGR. In a specific aspect the DC-specific antibody or fragment comprises αDCIR, αLangerin, αLOX-1 or αCD40. In a related aspect the DC-specific antibody is humanized and the composition is administered to the human or animal subject by an oral route, a nasal route, topically or as an injection. In one aspect the injection is selected from the group consisting of subcutaneous, intravenous, intraperitoneal, intramuscular, and intravenous.

[0015] A tuberculosis vaccine composition is disclosed in one embodiment of the instant invention. The composition comprises a dendritic cell (DC)-specific antibody or fragment thereof comprising αDCIR, αLangerin, αLOX-1 or αCD40 fused to one or more antigens or antigenic peptides selected from at least one of SEQ ID NOS: 1, 2, 3, 4, 5, 71 to 135, 137, 139, 141, 143, 145, 147, 149, 151, 153, 155, 157, 159, 161, 163, 165, 167, 169, 171, 173, 175, 177, 179, 181, 183, 185, 187, 189, 191, 193, 195, 197, 199, 201, 203, 205, 207, 209, 211, 213, 215, 217, 219, or 211, wherein the antigens or the antigenic peptides are conjugated to a heavy chain of the DC-specific antibody via one or more flexible linkers and an optional pharmaceutically acceptable carrier or an adjuvant.

[0016] Another embodiment of the instant invention describes a tuberculosis vaccine comprising: a dendritic cell (DC)-specific antibody or fragment thereof comprising αDCIR, αLangerin, αLOX-1 or αCD40 fused to one or more antigens selected from at least one of SEQ ID NOS: 1, 2, 3, 4, 5, 71 to 135, 137, 139, 141, 143, 145, 147, 149, 151, 153, 155, 157, 159, 161, 163, 165, 167, 169, 171, 173, 175, 177, 179, 181, 183, 185, 187, 189, 191, 193, 195, 197, 199, 201, 203, 205, 207, 209, 211, 213, 215, 217, 219, or 211, wherein the antigens or the antigenic peptides are conjugated to a heavy chain of the DC-specific antibody via one or more flexible linkers and an optional pharmaceutically acceptable carrier or an adjuvant. A tuberculosis vaccine comprising a dendritic cell (DC)-specific antibody or fragment thereof comprising αDCIR, αLangerin, αLOX-1 or αCD40 fused to one or more antigens or antigenic peptide comprising SEQ ID NO: 3, wherein the antigen or the antigenic peptide is conjugated to a light chain of the DC-specific antibody via one or more flexible linkers and an optional pharmaceutically acceptable carrier or an adjuvant is also disclosed herein.

[0017] In yet another embodiment the instant invention provides a method for increasing effectiveness of one or more dendritic cells (DCs) comprising the steps of: a) isolating the DCs from a patient, b) exposing the DCs to activating amounts of a vaccine comprising a dendritic cell (DC)-specific antibody or fragment thereof loaded, fused or conjugated to one or more antigens selected from at least one of SEQ ID NOS: 1, 2, 3, 4, 5, 71 to 135, 137, 139, 141, 143, 145, 147, 149, 151, 153, 155, 157, 159, 161, 163, 165, 167, 169, 171, 173, 175, 177, 179, 181, 183, 185, 187, 189, 191, 193, 195, 197, 199, 201, 203, 205, 207, 209, 211, 213, 215, 217, 219, or 211, and any combinations thereof wherein the antigens or the antigenic peptides are conjugated to a heavy chain, a light chain or both of the DC-specific antibody via one or more flexible linkers; and an optional pharmaceutically acceptable carrier or an adjuvant, and c) reintroducing the antigen-loaded and activated DCs into the patient. In one aspect of the method the DC-specific antibody or fragment comprises αDCIR, αLangerin, αLOX-1 or αCD40.

[0018] A method of providing immunostimulation by activation of one or more dendritic cells (DCs) to a human subject for a prophylaxis, a therapy or a combination thereof against one or more viral, bacterial, fungal, parasitic, protozoal, and parasitic diseases, and allergic disorders is disclosed in one embodiment of the present invention. The immunostimulation method comprises the steps of: (i) identifying the human subject in need of immunostimulation for the prophylaxis, the therapy or a combination thereof against the one or more diseases or disorders; (ii) isolating one or more DCs from the human subject; (iii) activating the isolated DCs with an amount of a composition effective to form activated DCs comprising a dendritic cell (DC)-specific antibody or fragment thereof loaded, fused or conjugated to one or more antigens or antigenic peptides, wherein the antigens or the antigenic peptides are conjugated to a heavy chain, a light chain or both of the DC-specific antibody via one or more flexible linkers; and an optional pharmaceutically acceptable carrier or an adjuvant; and (iv) reintroducing the activated DCs into the human subject. In a specific aspect the bacterial disease is tuberculosis. In one aspect of the method the antigens selected from at least one of SEQ ID NOS: 1, 2, 3, 4, 5, 71 to 135, 137, 139, 141, 143, 145, 147, 149, 151, 153, 155, 157, 159, 161, 163, 165, 167, 169, 171, 173, 175, 177, 179, 181, 183, 185, 187, 189, 191, 193, 195, 197, 199, 201, 203, 205, 207, 209, 211, 213, 215, 217, 219, or 211, and any combinations thereof. In another aspect of the method the DC-specific antibody or fragment is selected from an anti-DCIR, αDCIR, MHC class I, MHC class II, CD1, CD2, CD3, CD4, CD8, CD11b, CD14, CD15, CD16, CD19, CD20, CD29, CD31, αCD40, CD43, CD44, CD45, CD54, CD56, CD57, CD58, CD83, CD86, CMRF-44, CMRF-56, DCIR, DC-ASPGR, CLEC-6, CD40, BDCA-2, MARCO, DEC-205, mannose receptor, αLangerin, DECTIN-1, B7-1, B7-2, IFN-γ receptor and IL-2 receptor, ICAM-1, Fcγ receptor, αLOX-1 or ASPGR. In yet another aspect the DC-specific antibody or fragment comprises αDCIR, αLangerin, αLOX-1 or αCD40.

[0019] In another embodiment the instant invention describes a method for a treatment, a prophylaxis or a combination thereof against tuberculosis in a human subject comprising the steps of: identifying the human subject in need of the treatment, the prophylaxis or a combination thereof against tuberculosis; and administering a vaccine composition comprising an anti-dendritic cell (DC)-specific antibody or fragment thereof fused or conjugated to at least a portion of one or more recombinant or natural M. tuberculosis antigens or antigenic peptides, wherein the antigenic peptides are representative of one or more epitopes of the one or more antigens implicated in tuberculosis and an optional pharmaceutically acceptable carrier or an adjuvant.

[0020] The method as described hereinabove further comprises a flexible linker between the DC-specific antibody or fragment thereof and the one or more antigens. In one aspect the one or more antigens or antigenic peptides are conjugated to a heavy-chain, a light-chain or both of the anti-dendritic cell (DC)-specific antibody. In another aspect the one or more M. tuberculosis antigens are selected from at least one of SEQ ID NOS: 1, 2, 3, 4, 5, 71 to 135, 137, 139, 141, 143, 145, 147, 149, 151, 153, 155, 157, 159, 161, 163, 165, 167, 169, 171, 173, 175, 177, 179, 181, 183, 185, 187, 189, 191, 193, 195, 197, 199, 201, 203, 205, 207, 209, 211, 213, 215, 217, 219, or 211, and any combinations thereof. In yet another aspect the DC-specific antibody or fragment is selected from an anti-DCIR, αDCIR, MHC class 1, MHC class II, CD1, CD2, CD3, CD4, CD8, CD11b, CD14, CD15, CD16, CD19, CD20, CD29, CD31, αCD40, CD43, CD44, CD45, CD54, CD56, CD57, CD58, CD83, CD86, CMRF-44, CMRF-56, DCIR, DC-ASPGR, CLEC-6, CD40, BDCA-2, MARCO, DEC-205, mannose receptor, αLangerin, DECTIN-1, B7-1, B7-2, IFN-γ receptor and IL-2 receptor, ICAM-1, Fcγ receptor, αLOX-1 or ASPGR. In a related aspect the humanized DC-specific antibody or fragment comprises αDCIR, αLangerin, αLOX-1 or αCD40. In another aspect the composition is administered to the human or animal subject by an oral route, a nasal route, topically or as an injection. In another aspect the injection is selected from the group consisting of subcutaneous, intravenous, intraperitoneal, intramuscular, and intravenous.

[0021] An immunostimulatory composition for generating an immune response is disclosed in one embodiment of the present invention. The composition provides a prophylaxis, a therapy or any combination thereof against tuberculosis in a human or animal subject and comprises: a) an anti-dendritic cell (DC)-specific antibody or fragment thereof fused or conjugated to at least a portion of one or more M. tuberculosis antigens or antigenic peptides, b) at least one Toll-Like Receptor (TLR) agonist which is selected from the group consisting of TLR1, TLR2, TLR3, TLR4, TLR5, TLR6, TLR7, and TLR8 agonists and c) a pharmaceutically acceptable carrier, wherein the conjugate is comprised in an amount effective to generate the immune response against tuberculosis. In one aspect the one or more M. tuberculosis antigens are selected from the group consisting of SEQ ID NO: 1, SEQ ID NO: 2, SEQ ID NO: 3, SEQ ID NO: 4, SEQ ID NO: 5, and any combinations thereof. In another aspect the DC-specific antibody or fragment comprises αDCIR, αLangerin, αLOX-1 or αCD40.

[0022] The present invention also discloses A tuberculosis vaccine comprising: an anti-dendritic cell (DC)-specific antibody or fragment thereof fused or conjugated to at least a portion of one or more recombinant or natural M. tuberculosis antigens or antigenic peptides, wherein the antigenic peptides are representative of one or more epitopes of the one or more antigens implicated in tuberculosis, at least one Toll-Like Receptor (TLR) agonist which is selected from the group consisting of TLR1, TLR2, TLR3, TLR4, TLR5, TLR6, TLR7, and TLR8 agonists, and one or more optional pharmaceutically acceptable carriers and adjuvants. In one aspect the one or more M. tuberculosis antigens are selected from at least one of SEQ ID NOS: 1, 2, 3, 4, 5, 71 to 135, 137, 139, 141, 143, 145, 147, 149, 151, 153, 155, 157, 159, 161, 163, 165, 167, 169, 171, 173, 175, 177, 179, 181, 183, 185, 187, 189, 191, 193, 195, 197, 199, 201, 203, 205, 207, 209, 211, 213, 215, 217, 219, or 211, and any combinations thereof. In another aspect the DC-specific antibody or fragment is selected from an anti-DCIR, αDCIR, MHC class I, MHC class II, CD1, CD2, CD3, CD4, CD8, CD11b, CD14, CD15, CD16, CD19, CD20, CD29, CD31, αCD40, CD43, CD44, CD45, CD54, CD56, CD57, CD58, CD83, CD86, CMRF-44; CMRF-56, DCIR, DC-ASPGR, CLEC-6, CD40, BDCA-2, MARCO, DEC-205, mannose receptor, αLangerin, DECTIN-1, B7-1, B7-2, IFN-γ receptor and IL-2 receptor, ICAM-1, Fcγ receptor, αLOX-1 or ASPGR. In yet another aspect the DC-specific antibody is humanized. In another aspect the composition is administered to the human or animal subject by an oral route, a nasal route, topically or as an injection, wherein the injection is selected from the group consisting of subcutaneous, intravenous, intraperitoneal, intramuscular, and intravenous.

[0023] In one embodiment the present invention discloses a method for a treatment, a prophylaxis or a combination thereof against tuberculosis in a human subject comprising the steps of: (i) identifying the human subject in need of the treatment, the prophylaxis or a combination thereof against tuberculosis, and (ii) administering a vaccine composition comprising: a) an anti-dendritic cell (DC)-specific antibody or fragment thereof fused or conjugated to at least a portion of one or more recombinant or natural M. tuberculosis antigens or antigenic peptides, wherein the antigenic peptides are representative of one or more epitopes of the one or more antigens implicated in tuberculosis; b) at least one Toll-Like Receptor (TLR) agonist which is selected from the group consisting of TLR1, TLR2, TLR3, TLR4, TLR5, TLR6, TLR7, and TLR8 agonists; and c) one or more optional pharmaceutically acceptable carriers and adjuvants.

[0024] In one aspect the vaccine described hereinabove further comprises a flexible linker between the DC-specific antibody or fragment thereof and the one or more antigens. In another aspect the one or more antigens or antigenic peptides are conjugated to a heavy-chain, a light-chain or both of the anti-dendritic cell (DC)-specific antibody. In yet another aspect the one or more M. tuberculosis antigens are selected from at least one of SEQ ID NOS: 1, 2, 3, 4, 5, 71 to 135, 137, 139, 141, 143, 145, 147, 149, 151, 153, 155, 157, 159, 161, 163, 165, 167, 169, 171, 173, 175, 177, 179, 181, 183, 185, 187, 189, 191, 193, 195, 197, 199, 201, 203, 205, 207, 209, 211, 213, 215, 217, 219, or 211, and any combinations thereof. In another aspect the DC-specific antibody or fragment is selected from an anti-DCIR, αDCIR, MHC class I, MHC class II, CD1, CD2, CD3, CD4, CD8, CD11b, CD14, CD15, CD16, CD19, CD20, CD29, CD31, αCD40, CD43, CD44, CD45, CD54, CD56, CD57, CD58, CD83, CD86, CMRF-44, CMRF-56, DCIR, DC-ASPGR, CLEC-6, CD40, BDCA-2, MARCO, DEC-205, mannose receptor, αLangerin, DECTIN-1, B7-1, B7-2, IFN-γ receptor and IL-2 receptor, ICAM-1, Fcγ receptor, αLOX-1 or ASPGR. In related aspects the DC-specific antibody or fragment comprises αDCIR, αLangerin, αLOX-1 or αCD40 and further the DC-specific antibody is humanized.

### BRIEF DESCRIPTION OF THE DRAWINGS

[0025] For a more complete understanding of the features and advantages of the present invention, reference is now made to the detailed description of the invention along with the accompanying figures and in which:

[0026] FIG. 1 shows the results of IFNγ measurement from the peripheral blood mononuclear cells (PBMCs) of tuberculosis (TB) patients, active and latent, that were incubated for 48 h with recombinant antigens;

[0027] FIG. 2 is a schematic showing TB antigens expressed as fusion proteins with the heavy chain of each antibody;

[0028] FIG. 3 is a schematic showing the fusion of Rv0475 to the light chain of each antibody;

[0029] FIG. 4 is a schematic representation of the chimeric recombinant antibody used as vaccine according to an embodiment of the present invention; and

[0030] FIGS. 5A-5F demonstrate the ability of recombinant anti-DCIR and anti-CD40 antibodies fused to individual TB antigen to elicit expansion of antigen-specific CD4+ T cells from TB patients: Delivering ESAT6 to DCs through CD40 and DCIR induces IFNγ-TNFα-producing ESAT6-specific CD4+ T cells. Monocytes-derived DCs (GM-CSF & IFNγ) were loaded ON with 10 (FIGS. 5A-5C) or 100 pM (FIGS. 5D-5F) of each targeting antibody. T cells were then added (1:40 ratio) and cultivated for 8 days with addition of 100 U of IL-2 at day 2 and day 5. At day 9, DCs were thawed and loaded ON with 1 nM of targeting mAbs (IgG4, αCD40 and αDCIR). On day 9.5 50,000 loaded-DCs (IgG4, αCD40 and αDCIR) or unloaded were then added. After 6 h, frequency of peptide-specific CD4+ and CD8+ T cells with intracellular IFNγ+TNFα+ was assessed by FACS analysis.

[0031] FIGS. 6A (non-reduced) and 6B (reduced) are gels that show the expression of the constructs listed as follows: In FIG. 6A—Lane 1. hIgG4-Flex-v1-m.tbRv1980-f4-m.tbRv0288-f2-m.tbAg85BDel41; Lane 2. manti-CD40_{—}12E12.3F3-hIgG4HC-Flex-v1-m.tbRv1980-f4-m.tbRv0288-f2-m.tbAg85BDel41; Lane 3. mAnti-DCIR_{—}9E8-hIgG4-C-Flex-v1-m.tbRv1980-f4-m.tbRv0288-f2-m.tbAg85BDel41; Lane 4. hIgG4-Flex-v1-m.tbAg85BDel41-f2-m.tbESAT6-f4-m.tbRv1980; Lane 5. manti-CD40_{—}12E12-hIgG4-C-Flex-v1-m.tbAg85BDel41-f2-m.tbESAT6-f4-m.tbRv1980; Lane 6. hIgG4-Flex-v1-m.tbRv1980-f4-m.tbRv0288-f2-m.tbAg85BDel41; Lane 7. manti-CD40_{—}12E12.3F3-hIgG4HC-Flex-v1-m.tbRv1980-f4-m.tbRv0288-f2-m.tbAg85BDel41; Lane 8. mAnti-DCIR_{—}9E8-hIgG4-C-Flex-v1-m.tbRv1980-f4-m.tbRv0288-f2-m.tbAg85BDel41; Lane 9. hIgG4-Flex-v1-m.tbAg85BDel41-f2-m.tbESAT6-f4-m.tbRv1980; Lane 10. manti-CD40_{—}12E12-hIgG4-C-Flex-v1-m.tbAg85BDel141-f2-m.tbESAT6-f4-m.tbRv1980. In FIG. 6B—Lane 1. hIgG4-Flex-v1-m.tbRv1980-f4-m.tbRv028842-m.tbAg85BDel41; Lane 2. manti-CD40_{—}12E12.3F3-hIgG4HC-Flex-v1-m.tbRv1980-f4-m.tbRv0288-f2-m.tbAg85BDel41; Lane 3. mAnti-DCIR_{—}9E8-hIgG4-C-Flex-v1-m.tbRv1980-f4-m.tbRv0288-f2-m.tbAg85BDel41; Lane 4. hIgG4-Flex-v1-m.tbAg85BDel41-f2-m.tbESAT6-f4-m.tbRv1980; Lane 5. manti-CD40_{—}12E12-hIgG4-C-Flex-v1-m.tbAg85BDel41-f2-m.tbESAT6-f4-m.tbRv1980; Lane 6. mAnti-DCIR_{—}9E8-hIgG4-C-Flex-v1-m.tbAg85BDel41-f2-m.tbESAT6-f4-m.tbRv1980; Lane 7. manti-CD40_{—}12E12-hIgG4-C-Flex-v1m.tbCFP10-f2-m.tbESAT6; Lane 8. hIgG4-Flex-v1-m.tbCFP10-f2-m.tbESAT6; Lane 9. mAnti-DCIR_{—}9E8-hIgG4-C-Flex-v1-m.tbCFP10-f2-m.tbESAT6; Lane 10. mAnti-DCIR_{—}9E8-hIgG4-C-Flex-v1-m.tbHspX. The sequences for each of these constructs is detailed hereinbelow.

### DETAILED DESCRIPTION OF THE INVENTION

[0032] While the making and using of various embodiments of the present invention are discussed in detail below, it should be appreciated that the present invention provides many applicable inventive concepts that can be embodied in a wide variety of specific contexts. The specific embodiments discussed herein are merely illustrative of specific ways to make and use the invention and do not delimit the scope of the invention.

[0033] To facilitate the understanding of this invention, a number of terms are defined below. Terms defined herein have meanings as commonly understood by a person of ordinary skill in the areas relevant to the present invention. Terms such as “a”, “an,” and “the” are not intended to refer to only a singular entity, but include the general class of which a specific example may be used for illustration. The terminology herein is used to describe specific embodiments of the invention, but their usage does not delimit the invention, except as outlined in the claims.

[0034] As used herein, the term “Antigen Presenting Cells” (APC) refers to cells that are capable of activating T cells, and include, but are not limited to, certain macrophages, B cells and dendritic cells. “Dendritic cells” (DCs) refers to any member of a diverse population of morphologically similar cell types found in lymphoid or non-lymphoid tissues. These cells are characterized by their distinctive morphology, high levels of surface MHC-class II expression (Steinman, et al., Ann. Rev. Immunol. 9:271 (1991); incorporated herein by reference for its description of such cells). These cells can be isolated from a number of tissue sources, and conveniently, from peripheral blood, as described herein. Dendritic cell binding proteins refers to any protein for which receptors are expressed on a dendritic cell. Examples include GM-CSF, IL-1, TNF, IL-4, CD40L, CTLA4, CD28, and FLT-3 ligand.

[0035] For the purpose of the present invention, the term “vaccine composition” is intended to mean a composition which can be administered to humans or to animals in order to induce an immune system response; this immune system response can result in a production of antibodies or simply in the activation of certain cells, in particular antigen-presenting cells, T lymphocytes and B lymphocytes. The vaccine composition can be a composition for prophylactic purposes or for therapeutic purposes, or both. As used herein, the term “antigen” refers to any antigen which can be used in a vaccine, whether it involves a whole microorganism or a subunit, and whatever its nature: peptide, protein, glycoprotein, polysaccharide, glycolipid, lipopeptide, etc. They may be viral antigens, bacterial antigens, or the like; the term “antigen” also comprises the polynucleotides, the sequences of which are chosen so as to encode the antigens whose expression by the individuals to which the polynucleotides are administered is desired, in the case of the immunization technique referred to as DNA immunization. They may also be a set of antigens, in particular in the case of a multivalent vaccine composition which comprises antigens capable of protecting against several diseases, and which is then generally referred to as a vaccine combination, or in the case of a composition which comprises several different antigens in order to protect against a single disease, as is the case for certain vaccines against whooping cough or the flu, for example. The term “antibodies” refers to immunoglobulins, whether natural or partially or wholly produced artificially, e.g. recombinant. An antibody may be monoclonal or polyclonal. The antibody may, in some cases, be a member of one, or a combination immunoglobulin classes, including: IgG, IgM, IgA, IgD, and IgE.

[0036] The term “adjuvant” refers to a substance that enhances, augments or potentiates the host's immune response to a vaccine antigen.

[0037] The term “gene” is used to refer to a functional protein, polypeptide or peptide-encoding unit. As will be understood by those in the art, this functional term includes both genomic sequences, cDNA sequences, or fragments or combinations thereof, as well as gene products, including those that may have been altered by the hand of man. Purified genes, nucleic acids, protein and the like are used to refer to these entities when identified and separated from at least one contaminating nucleic acid or protein with which it is ordinarily associated.

[0038] As used herein, the term “nucleic acid” or “nucleic acid molecule” refers to polynucleotides, such as deoxyribonucleic acid (DNA) or ribonucleic acid (RNA), oligonucleotides, fragments generated by the polymerase chain reaction (PCR), and fragments generated by any of ligation, scission, endonuclease action, and exonuclease action. Nucleic acid molecules can be composed of monomers that are naturally-occurring nucleotides (such as DNA and RNA), or analogs of naturally-occurring nucleotides (e.g., α-enantiomeric forms of naturally-occurring nucleotides), or a combination of both. Modified nucleotides can have alterations in sugar moieties and/or in pyrimidine or purine base moieties. Sugar modifications include, for example, replacement of one or more hydroxyl groups with halogens, alkyl groups, amines, and azido groups, or sugars can be functionalized as ethers or esters. Moreover, the entire sugar moiety can be replaced with sterically and electronically similar structures, such as aza-sugars and carbocyclic sugar analogs. Examples of modifications in a base moiety include alkylated purines and pyrimidines, acylated purines or pyrimidines, or other well-known heterocyclic substitutes. Nucleic acid monomers can be linked by phosphodiester bonds or analogs of such linkages. Analogs of phosphodiester linkages include phosphorothioate, phosphorodithioate, phosphoroselenoate, phosphorodiselenoate, phosphoroanilothioate, phosphoranilidate, phosphoramidate, and the like. The term “nucleic acid molecule” also includes so-called “peptide nucleic acids,” which comprise naturally-occurring or modified nucleic acid bases attached to a polyamide backbone. Nucleic acids can be either single stranded or double stranded.

[0039] As used in this application, the term “amino acid” means one of the naturally occurring amino carboxylic acids of which proteins are comprised. The term “polypeptide” as described herein refers to a polymer of amino acid residues joined by peptide bonds, whether produced naturally or synthetically. Polypeptides of less than about 10 amino acid residues are commonly referred to as “peptides.” A “protein” is a macromolecule comprising one or more polypeptide chains. A protein may also comprise non-peptidic components, such as carbohydrate groups. Carbohydrates and other non-peptidic substituents may be added to a protein by the cell in which the protein is produced, and will vary with the type of cell. Proteins are defined herein in terms of their amino acid backbone structures; substituents such as carbohydrate groups are generally not specified, but may be present nonetheless.

[0040] As used herein, the term “in vivo” refers to being inside the body. The term “in vitro” used as used in the present application is to be understood as indicating an operation carried out in a non-living system.

[0041] As used herein, the term “treatment” or “treating” means any administration of a compound of the present invention and includes (1) inhibiting the disease in an animal that is experiencing or displaying the pathology or symptomatology of the diseased (i.e., arresting further development of the pathology and/or symptomatology), or (2) ameliorating the disease in an animal that is experiencing or displaying the pathology or symptomatology of the diseased (i.e., reversing the pathology and/or symptomatology).

[0042] The present invention describes a novel tuberculosis (TB) human vaccine based on in vivo dendritic cell (DC)-targeting. The vaccine comprises a conjugate of one or more high affinity monoclonal antibodies against several DC receptors with several M. tuberculosis protein antigens. The vaccine composition described herein delivers antigen specifically to DCs for the purpose of vaccination to evoke potent humoral and cellular immune responses. The vaccine composition of the present invention promotes efficient recall memory induced in blood from TB patients.

[0043] TB is a leading cause of death: in 2006, there were 9.2 million new cases of active TB and an estimated 1.5 million deaths in the world, according to the World Health Organization. It is estimated that one-third of the world's population harbors Mycobacterium tuberculosis (M. tuberculosis) in the form of non-replicating bacilli (latent tuberculosis) (1). In addition, an increasing proportion of TB cases results from infection with M. tuberculosis resistant to first line chemotherapy (multi-drug resistant TB or MDR-TB) (2). M. bovis BCG, the only vaccine against TB currently available, prevents 80% of childhood military disease and meningitis, but its efficacy in preventing pulmonary disease in adulthood is rather low (3). Therefore, efficient therapeutic vaccines are urgently needed to cure active and latent TB patients. Furthermore, according to the World Health Organization, M. tuberculosis is also the major opportunistic pathogen associated with HIV disease, contributing significantly to HIV-associated mortality (almost 25% of HIV-related deaths are from TB).

[0044] Dendritic cells (DCs) are leukocytes specialized in the uptake, processing and presentation of antigens and play fundamental roles in regulating both innate and adaptive immunity functions and in maintaining immunological tolerance. They are mainly localized at the interface between body surfaces and the environment, continuously scrutinizing incoming antigen for the potential threat it may represent for the body. To control immune responses against a large variety of microorganisms including viruses and bacteria they exhibit at their surface a large number of receptors, which have been shown to be crucial in DC biological functions in vivo by sensing pathogen-associated molecular patterns (PAMPs). These specialized pathogen recognition receptors (PRRs) whose engagement modulates the functional activity of DCs, include C-type lectin receptors (CLRs) and Toll-like receptors (TLRs) (4). Following pathogen contact, PRRs are endocytosed by immature DCs, which induce the DC to enter a developmental program called maturation, which transforms DCs from sentinels into efficient APCs and T cell stimulators (5). With the induction of maturation, DCs undergo massive morphological and functional changes. Antigen internalization is down modulated due to repression of most antigen-receptors and to an overall reduction in phagocytosis and macropinocytosis. In addition, MHC molecules are redistributed from intracellular endocytic compartments to the cell surface (6,7). Peptide loading as well as the half-life of MHC molecules is increased (6,7). Finally, the surface expression of T cell costimulatory molecules also rises. Concomitant with the modifications of their antigen presentation abilities, maturation induces migration of DCs out of peripheral tissues (8). Modifications in the expression of chemokine receptors and adhesion molecules, as well as profound changes of the cytoskeleton organization, contribute to the migration of DCs, through the lymph, towards secondary lymphoid organs (9). By linking antigen uptake, peptide loading, and cell migration to the encounter of a pathogen, DCs restrict antigen presentation to those antigens internalized during maturation, thus favoring the stimulation of T cells specific for potentially pathogenic antigens.

[0045] All these biological events result in the activation of specific signaling pathways that lead to the induction of specific immune responses against these pathogens, in part through expression of effector cytokines. The resulting T cell responses following these interactions between PRRs and PAMPs have been extensively studied. However, little is known about the way the PPRs are internalized and how from inside the cell, they are able to dictate and orientate immune responses. The present inventors have previously produced high affinity monoclonal antibodies against several DC receptors, and prepared fusion proteins with antigens for DC-targeting vaccine generation. Targeting antigens to DCs using these fusion proteins recognizing different CLRs resulted in different biological responses. The inventors hypothesize is that subsets of human DCs express distinct receptors that need to be mobilized in order to mount a durable immune response adapted to each microbial invasion, depending on the pathogen to be eliminated. To test this hypothesis, the inventors have prepared high affinity monoclonal antibodies against several DC receptors to which antibodies have been conjugated to several M. tuberculosis protein antigens to develop novel human vaccines based on in vivo DC-targeting.

[0046] Construction of TB vaccine, Antigen selection: M. tuberculosis genome encodes for more than 4000 genes. Antigens selected were tested with PBMCs from active or latent TB patients. IFNγ secretion was measured to identify antigens recognized (FIG. 1). The data showed that several antigens are broadly recognized and therefore constitute potential antigens that will be fused to recombinant mAb. These include: ESAT6, CFP10, Rv1980 and combination of antigens: CFP10-f2-ESAT6 and Rv0287-f2-Rv0288. One antigen, Rv0475, is recognized mainly by latent TB patient as already reported in the literature (10-12). Because ESAT6 and CFP10 are used as a diagnostic tool to identify TB patients from environmental mycobacteria-infected person, clinical trials have focused on using Rv0288 instead of ESAT6. The inventors also chose Ag85B as a potential antigen even though its immunogenicity was not detected in the study described above. The inventors chose 5 antigens: ESAT6, Rv0288, Rv0475, Rv1980 and Ag85B. The sequences of the selected antigens are presented herein below. The underlined amino acids within parentheses are sequences that have been removed from the protein for better expression.

ESAT6 (95 amino acids):

(SEQ ID NO: 1)

MTEQQWNFAGIEAAASAIQGNVTSIHSLLDEGKQSLTKLAAAWGGSGSEA
YQGVQQKWDATATELNNALQNLARTISEAGQAMASTEGNVTGMFA
Rv0288 (96 amino acids):

(SEQ ID NO: 2)

MSQIMYNYPAMLGHAGDMAGYAGTLQSLGAEIAVEQAALQSAWQGDTGIT
YQAWQAQWNQAMEDLVRAYHAMSSTHEANTMAMMARDTAEAAKWGG
Rv0475 (199 amino acids):

(SEQ ID NO: 3)

MAENSNIDDIKAPLLAALGAADLALATVNELITNLRERAEETRTDTRSRV
EESRARLTKLQEDLPEQLTELREKFTAEELRKAAEGYLEAATSRYNELVE
RGEAALERLRSQQSFEEVSARAEGYVDQAVELTQEALGTVASQTRAVG
ERAAKLVGIELPKKAAPAKKAAPAKKAAPAKKAAAKKAPAKKAAAKKV
TQK
Rv1980Δ24 (228 amino acids):

(SEQ ID NO: 4)

(MRIKIFMLVTAVVLLCCSGVATAA)PKTYCEELKGTDTGQACQIQMSDP
AYNINISLPSYYPDQKSLENYIAQTRDKFLSAATSSTPREAPYELNITSA
TYQSAIPPRGTQAVVLKVYQNAGGTHTTTYKAFDWDQAYRKPITYDTL
WQADTDPLPVVFPIVQGELSKQTGQQVSIAPNAGLDPVNYQNFAVTN
DGVIFFFNPGELLPEAAGPTQVLVPRSAIDSMLA
Ag85BΔ41 (228 amino acids):

(SEQ ID NO: 5)

(MTDVSRKIRAWGRRLMIGTAAAVVLPGLVGLAGGAATAGAF)SRPGLPV
EYLQVPSPSMGRDIKVQFQSGGNNSPAVYLLDGLRAQDDYNGWDINTPAF
EWYYQSGLSIVMPVGGQSSFYSDWYSPACGKAGCQTYKWETFLTSELPQW
LSANRAVKPTGSAAIGLSMAGSSAMILAAYHPQQFIYAGSLSALLDPSQG
MGPSLIGLAMGDAGGYKAADMWGPSSDPAWERNDPTQQIPKLVANNTRLW
VYCGNGTPNELGGANIPAEFLENFVRSSNLKFQDAYNAAGGHNAVFNFPP
NGTHSWEYWGAQLNAMKGDLQSSLGAG

[0047] Vaccine description: Vaccines are recombinant monoclonal antibodies recognizing specific receptors expressed at the surface of DCs. These recombinant mAb are then conjugated to selected antigens (fusion to the C terminus of the heavy chain or the light chain). The inventors selected four recombinant antibodies: αCD40, αDCIR, αLox-1 and αLangerin. These antibodies have been conjugated to the selected antigens Ag85BΔ41, ESAT6, Rv0288 and Rv1980Δ24 from M. tuberculosis (FIG. 2). To cover as many potential epitopes from different antigens as possible, the inventors fused three selected antigens to the heavy chain of different recombinant mAbs, resulting in 2 constructs (FIG. 2). One antigen, Rv0475, was also fused to the light chain of each antibody (FIG. 3). The vaccine harbors three antigens fused to the heavy chain (Ag85B, Rv1980 and ESAT6 or Rv0288) and one to the light chain (Rv0475) as depicted in FIG. 4.

[0048] Vaccine evaluation: Vaccine candidates were tested in targeting studies by incubating vaccines with peripheral blood mononuclear cells (PBMCs) from TB patients (latent or active) or by loading monocyte-derived DCs with the recombinant mAb follow by addition of T-lymphocytes. After 11 days of culture, the efficiency of each vaccine in eliciting an immune recall response was assessed by cytokines secretion (in the culture supernatant or following intracellular staining) as seen in FIGS. 5A-5F and Table 1.

[0049] FIGS. 5A-5F demonstrate the ability of recombinant anti-DCIR and anti-CD40 antibodies fused to individual TB antigen to elicit expansion of antigen-specific CD4+ T cells from TB patients: Delivering ESAT6 to DCs through CD40 and DCIR induces IFNγ-TNFα-producing ESAT6-specific CD4+ T cells. Monocytes-derived DCs (GM-CSF and IFNγ) were loaded ON with 10 (FIGS. 5A-5C) or 100 pM (FIGS. 5D-5F) of each targeting antibody. T cells were then added (1:40 ratio) and cultivated for 8 days with addition of 100 U of IL-2 at day 2 and day 5. At day 9, DCs were thawed and loaded ON with 1 nM of targeting mAbs (IgG4, αCD40 and αDCIR). On day 9.5 50,000 loaded-DCs (IgG4, αCD40 and αDCIR) or unloaded were then added. After 6 h, frequency of peptide-specific CD4+ and CD8+ T cells with intracellular IFNγ+TNFα+ was assessed by FACS analysis. Thus, the data shows that αCD40 and αDCIR vaccines bearing a TB antigen can recall a potent memory antigen-specific anti-CD4+ T cell response in vitro. In this in vitro culture system αCD40 and αDCIR are equally potent vaccines (DCs used in this assay express both receptors).

TABLE 1
Demonstration of the ability of TB antigen vaccines to induce IFNα secretion at low doses.

| mAb | aTB#5 | aTB#7 | aTB#8 | DCTB#02 |
|---|---|---|---|---|
| IgG4-ESAT6 | 0.1 nM (~600) | 0.1 nM (~30) | 1 nM (~300) | 1 nM (~300) |
| | 0.01 nM (~50) | 0.01 nM (~10) | 0.1 nM (~60) | 0.1 nM (~60) |
| aCD40- | 0.1 nM (~600) | 0.1 nM (~140) | 1 nM (~3500) | 1 nM (~3500) |
| ESAT6 | 0.01 nM (~1000) | 0.01 nM (~500) | 0.1 nM (~2500) | 0.1 nM (~2500) |
| aDCIR- | 0.1 nM (~600) | 0.1 nM (~300) | 1 nM (~2500) | 1 nM (~2500) |
| ESAT6 | 0.01 nM (~1000) | 0.01 nM (~175) | 0.1 nM (~900) | 0.1 nM (~900) |
| IgG4-CFP10 | 0.01 nM (~470) | 0.1 nM (~20) | 0.1 nM (~700) | 0.01 nM (~2300) |
| | 0.001 nM (~80) | 0.01 nM (~10) | 0.01 nM (~50) | 0.001 n89 (~50 |
| aCD40- | 0.01 nM (~4800) | 0.1 nM (~350) | 0.1 nM (~3200) | 0.01 nM (~3000) |
| CFP10 | 0.001 nM (~2900) | 0.01 nM (~280) | 0.01 nM (~6000) | 0.001 nM (~3500) |
| aDCIR- | 0.01 nM (~1500) | 0.1 nM (~350) | 0.1 nM (~2000) | 0.01 nM (~3000) |
| CFP10 | 0.001 nM (~7300) | 0.01 nM (~260) | 0.01 nM (~3000) | 0.001 nM (~3900) |
| IgG4-Ag85B | 0.01 nM (~190) | ND | ND | ND |
| | 0.001 nM (~40) | | | |
| aCD40- | 0.01 nM (~6000) | ND | ND | ND |
| Ag85B | 0.001 nM (~10000) | | | |
| aDCIR- | 0.1 nM (~14000) | ND | ND | ND |
| Ag85B | 0.01 nM (~6000) | | | |
| IgG1-Rv1980 | 0.1 nM (~500) | ND | ND | ND |
| | 0.01 nM (~60) | | | |
| | 0.001 nM (~15) | | | |
| aCD40- | 0.01 nM (~2000) | ND | ND | ND |
| Rv1980 | 0.001 nM (~11000) | | | |
| aDCIR- | 0.1 nM (~3000) | ND | ND | ND |
| Rv1980 | 0.01 nM (~19000) | | | |

[0050] ESAT6 and CFP-10 were fused to IgG4, αCD40 and αDCIR and incubated with PBMCs from TB patients at different concentration (from 10 nM to 1 pM). Cells were cultivated for 8 days with addition of 100 U of IL-2 at day 2 and day 5. At day 8, cells were washed in DPBS and rested for 36 h. At day 9.5, cluster of peptides (10 μM each peptide) were used to stimulate cells for another 36 h. Supernatants were recovered and IFNγ secretion measured. IFNγ secretion is indicated in pg/ml.

[0051] The data presented hereinabove shows that both αCD40 and αDCIR vaccines bearing TB antigens can recall a potent memory antigen-specific T cell response in vitro resulting in IFNγ secretion. Specific immune responses were observed with low doses of vaccines, i.e., between 1 and 100 pM. Both constructs induced similar levels of IFNγ secretion in different patients.

[0052] Non-limiting examples different DC-specific antibodies or fragments (both nucleotide and protein sequences) that may be used in the preparation of the TB vaccine of the present invention are shown herein below:

Anti_CLEC_6_9B9.2G12_Hv-V-hIgG4H-C (SEQ ID NO: 6):
ATGGGCAGGCTTACTTCTTCATTCTTGCTACTGATTGTCCCTGCATATGTCCTGTCCCAGGTTAC
TCTGAAAGAGTCTGGCCCTGGGATATTGCAGCCCTCCCAGACCCTCAGTCTGACCTGTTCTTTC
TCTGGGTTTTCACTGAGCACTTCTGGTATGAGTGTAGGCTGGATTCGTCAGCCTTCAGGGAAGG
GTCTGGAGTGGCTGGCTCACATTTGGTGGAATGATGATAAGTACTATAATCCAGTCCTGAAAA
GCCGGCTCACAATCTCCAAGGAGACCTCCAACAACCAGGTATTCCTCAAGATCGCCAGTGTGG
TCTCTGCAGATACTGCCACATACTACTGTGCTCGATTCTATGGTAACTGTCTTGACTACTGGGG
CCAAGGCACCACTCTCACAGTCTCCTCGGCCAAAACAaagggcccATCCGTCTTCCCCCTGGCGCC
CTGCTCCAGGAGCACCTCCGAGAGCACAGCCGCCCTGGGCTGCCTGGTCAAGGACTACTTCCC
CGAACCGGTGACGGTGTCGTGGAACTCAGGCGCCCTGACCAGCGGCGTGCACACCTTCCCGGC
TGTCCTACAGTCCTCAGGACTCTACTCCCTCAGCAGCGTGGTGACCGTGCCCTCCAGCAGCTTG
GGCACGAAGACCTACACCTGCAACGTAGATCACAAGCCCAGCAACACCAAGGTGGACAAGAG
AGTTGAGTCCAAATATGGTCCCCCATGCCCACCCTGCCCAGCACCTGAGTTCGAAGGGGGACC
ATCAGTCTTCCTGTTCCCCCCAAAACCCAAGGACACTCTCATGATCTCCCGGACCCCTGAGGTC
ACGTGCGTGGTGGTGGACGTGAGCCAGGAAGACCCCGAGGTCCAGTTCAACTGGTACGTGGAT
GGCGTGGAGGTGCATAATGCCAAGACAAAGCCGCGGGAGGAGCAGTTCAACAGCACGTACCG
TGTGGTCAGCGTCCTCACCGTCCTGCACCAGGACTGGCTGAACGGCAAGGAGTACAAGTGCAA
GGTCTCCAACAAAGGCCTCCCGTCCTCCATCGAGAAAACCATCTCCAAAGCCAAAGGGCAGCC
CCGAGAGCCACAGGTGTACACCCTGCCCCCATCCCAGGAGGAGATGACCAAGAACCAGGTCA
GCCTGACCTGCCTGGTCAAAGGCTTCTACCCCAGCGACATCGCCGTGGAGTGGGAGAGCAATG
GGCAGCCGGAGAACAACTACAAGACCACGCCTCCCGTGCTGGACTCCGACGGCTCCTTCTTCC
TCTACAGCAGGCTAACCGTGGACAAGAGCAGGTGGCAGGAGGGGAATGTCTTCTCATGCTCCG
TGATGCATGAGGCTCTGCACAACCACTACACACAGAAGAGCCTCTCCCTGTCTCTGGGTAAAG
CTAGCTGATTAATTAA
Anti_CLEC_6_9B9.2G12_Hv-V-hIgG4H-C (SEQ ID NO: 71):
MGRLTSSFLLLIVPAYVLSQVTLKESGPGILQPSQTLSLTCSFSGFSLSTSGMSVGWIRQPSGKGLEW
LAHIWWNDDKYYNPVLKSRLTISKETSNNQVFLKIASVVSADTATYYCARFYGNCLDYWGQGTTL
TVSSAKTKGPSVFPLAPCSRSTSESTAALGCLVKDYFPEPVTVSWNSGALTSGVHTFPAVLQSSGLY
SLSSVVTVPSSSLGTKTYTCNVDHKPSNTKVDKRVESKYGPPCPPCPAPEFEGGPSVFLFPPKPKDTL
MISRTPEVTCVVVDVSQEDPEVQFNWYVDGVEVHNAKTKPREEQFNSTYRVVSVLTVLHQDWLN
GKEYKCKVSNKGLPSSIEKTISKAKGQPREPQVYTLPPSQEEMTKNQVSLTCLVKGFYPSDIAVEWE
SNGQPENNYKTTPPVLDSDGSFFLYSRLTVDKSRWQEGNVFSCSVMHEALHNHYTQKSLSLSLGK
AS
Anti_CLEC_6_9B9.2G12_Kv-V-hIgGK-C (SEQ ID NO: 7):
ATGATGTCCTCTGCTCAGTTCCTTGGTCTCCTGTTGCTCTGTTTTCAAGGTACCAGATGTGATAT
CCAGATGACACAGACTACATCCTCCCTGTCTGCCTCTCTGGGAGACAGAGTCACCATCAGTTGC
AGGGCAAGTCAGGACATTAGCAATTATTTAAACTGGTATCAGCAGAAACCAGATGGAACTGTT
AAACTCCTGATCTACTACACATCAATATTACAATTAGGAGTCCCATCAAGATTCAGTGGCAGT
GGGTCTGAAACAGATTATTCTCTCACCATTAGCAACCTGGAGCAAGAAGATATTGCCACTTAC
TTTTGCCAACAGGGTGATTCGCTTCCATTCACGTTCGGCTCGGGGACAAAGCTCGAGATCAAA
CGAACTGTGGCTGCACCATCTGTCTTCATCTTCCCGCCATCTGATGAGCAGTTGAAATCTGGAA
CTGCCTCTGTTGTGTGCCTGCTGAATAACTTCTATCCCAGAGAGGCCAAAGTACAGTGGAAGG
TGGATAACGCCCTCCAATCGGGTAACTCCCAGGAGAGTGTCACAGAGCAGGACAGCAAGGAC
AGCACCTACAGCCTCAGCAGCACCCTGACGCTGAGCAAAGCAGACTACGAGAAACACAAAGT
CTATGCCTGCGAAGTCACCCATCAGGGCCTGAGCTCGCCCGTCACAAAGAGCTTCAACAGGGG
AGAGTGTTAG
Anti_CLEC_6_9B9.2G12_Kv-V-hIgGK-C (SEQ ID NO: 72):
MMSSAQFLGLLLLCFQGTRCDIQMTQTTSSLSASLGDRVTISCRASQDISNYLNWYQQKPDGTVKL
LIYYTSILQLGVPSRFSGSGSETDYSLTISNLEQEDIATYFCQQGDSLPFTFGSGTKLEIKRTVAAPSVF
IFPPSDEQLKSGTASVVCLLNNFYPREAKVQWKVDNALQSGNSQESVTEQDSKDSTYSLSSTLTLS
KADYEKHKVYACEVTHQGLSSPVTKSFNRGEC
Anti-ASGPR_49C11_7H-LV-hIgG4H-C (SEQ ID NO: 8):
ATGAGAGCGCTGATTCTTTTGTGCCTGTTCACAGCCTTTCCTGGTATCCTGTCTGATGTGCAGCT
TCAGGAGTCAGGACCTGACCTGGTGAAACCTTCTCAGTCACTTTCACTCACCTGCACTGTCACT
GGCTACTCCATCACCAGTGGTTATAGCTGGCACTGGATCCGGCAGTTTCCAGGAAACAAACTG
GAATGGATGGGCTACATACTCTTCAGTGGTAGCACTAACTACAACCCATCTCTGAAAAGTCGA
ATCTCTATCACTCGAGACACATCCAAGAACCAGTTCTTCCTGCAGTTGAATTCTGTGACTACTG
AGGACACAGCCACATATTTCTGTGCAAGATCTAACTATGGTTCCTTTGCTTCCTGGGGCCAAGG
GACTCTGGTCACTGTCTCTGCAGCCAAAACAACGGGCCCATCCGTCTTCCCCCTGGCGCCCTGC
TCCAGGAGCACCTCCGAGAGCACAGCCGCCCTGGGCTGCCTGGTCAAGGACTACTTCCCCGAA
CCGGTGACGGTGTCGTGGAACTCAGGCGCCCTGACCAGCGGCGTGCACACCTTCCCGGCTGTC
CTACAGTCCTCAGGACTCTACTCCCTCAGCAGCGTGGTGACCGTGCCCTCCAGCAGCTTGGGCA
CGAAGACCTACACCTGCAACGTAGATCACAAGCCCAGCAACACCAAGGTGGACAAGAGAGTT
GAGTCCAAATATGGTCCCCCATGCCCACCCTGCCCAGCACCTGAGTTCGAAGGGGGACCATCA
GTCTTCCTGTTCCCCCCAAAACCCAAGGACACTCTCATGATCTCCCGGACCCCTGAGGTCACGT
GCGTGGTGGTGGACGTGAGCCAGGAAGACCCCGAGGTCCAGTTCAACTGGTACGTGGATGGC
GTGGAGGTGCATAATGCCAAGACAAAGCCGCGGGAGGAGCAGTTCAACAGCACGTACCGTGT
GGTCAGCGTCCTCACCGTCCTGCACCAGGACTGGCTGAACGGCAAGGAGTACAAGTGCAAGGT
CTCCAACAAAGGCCTCCCGTCCTCCATCGAGAAAACCATCTCCAAAGCCAAAGGGCAGCCCCG
AGAGCCACAGGTGTACACCCTGCCCCCATCCCAGGAGGAGATGACCAAGAACCAGGTCAGCC
TGACCTGCCTGGTCAAAGGCTTCTACCCCAGCGACATCGCCGTGGAGTGGGAGAGCAATGGGC
AGCCGGAGAACAACTACAAGACCACGCCTCCCGTGCTGGACTCCGACGGCTCCTTCTTCCTCT
ACAGCAGGCTAACCGTGGACAAGAGCAGGTGGCAGGAGGGGAATGTCTTCTCATGCTCCGTG
ATGCATGAGGCTCTGCACAACCACTACACACAGAAGAGCCTCTCCCTGTCTCTGGGTAAAGCT
AGCTGATTAATTAA
Anti-ASGPR_49C11_7H-LV-hIgG4H-C (SEQ ID NO: 73):
MRALILLCLFTAFPGILSDVQLQESGPDLVKPSQSLSLTCTVTGYSITSGYSWHWIRQFPGNKLEWM
GYILFSGSTNYNPSLKSRISITRDTSKNQFFLQLNSVTTEDTATYFCARSNYGSFASWGQGTLVTVSA
AKTTGPSVFPLAPCSRSTSESTAALGCLVKDYFPEPVTVSWNSGALTSGVHTFPAVLQSSGLYSLSS
VVTVPSSSLGTKTYTCNVDHKPSNTKVDKRVESKYGPPCPPCPAPEFEGGPSVFLFPPKPKDTLMIS
RTPEVTCVVVDVSQEDPEVQFNWYVDGVEVHNAKTKPREEQFNSTYRVVSVLTVLHQDWLNGKE
YKCKVSNKGLPSSIEKTISKAKGQPREPQVYTLPPSQEEMTKNQVSLTCLVKGFYPSDIAVEWESNG
QPENNYKTTPPVLDSDGSFFLYSRLTVDKSRWQEGNVFSCSVMHEALHNHYTQKSLSLSLGKAS
Anti-ASGPR_49C11_7K-LV-hIgGK-C (SEQ ID NO: 9):
ATGGATTTTCAAGTGCAGATTTTCAGCTTCCTGCTAATCAGTGCCTCAGTCATAATATCCAGAG
GACAAATTGTTCTCACCCAGTCTCCAGCAATCATGTCTGCATCTCCAGGGGAGAAGGTCACCA
TGACCTGCAGTGCCAGCTCAAGTGTAAGTCACATGCACTGGTACCAGCAGAAGTCAGGCACTT
CCCCCAAAAGATGGATTTATGACACATCCAGACTGGCTTCTGGAGTCCCTGCTCGCTTCAGTGG
CAGTGGGTCTGGGACCTCTTACTCTCTCACAATCAGCAGCATGGAGGCTGAAGATGCTGCCAC
TTATTACTGCCAGCAGTGGAGTAGTCACCCATGGTCGTTCGGTGGAGGCACCAAACTCGAGAT
CAAACGAACTGTGGCTGCACCATCTGTCTTCATCTTCCCGCCATCTGATGAGCAGTTGAAATCT
GGAACTGCCTCTGTTGTGTGCCTGCTGAATAACTTCTATCCCAGAGAGGCCAAAGTACAGTGG
AAGGTGGATAACGCCCTCCAATCGGGTAACTCCCAGGAGAGTGTCACAGAGCAGGACAGCAA
GGACAGCACCTACAGCCTCAGCAGCACCCTGACGCTGAGCAAAGCAGACTACGAGAAACACA
AAGTCTATGCCTGCGAAGTCACCCATCAGGGCCTGAGCTCGCCCGTCACAAAGAGCTTCAACA
GGGGAGAGTGTTAG
Anti-ASGPR_49C11_7K-LV-hIgGK-C (SEQ ID NO: 74):
MDFQVQIFSFLLISASVIISRGQIVLTQSPAIMSASPGEKVTMTCSASSSVSHMHWYQQKSGTSPKR
WIYDTSRLASGVPARFSGSGSGTSYSLTISSMEAEDAATYYCQQWSSHPWSFGGGTKLEIKRTVAA
PSVFIFPPSDEQLKSGTASVVCLLNNFYPREAKVQWKVDNALQSGNSQESVTEQDSKDSTYSLSSTL
TLSKADYEKHKVYACEVTHQGLSSPVTKSFNRGEC
Anti-ASGPR_4G2.2_Hv-V-hIgG4H-C (SEQ ID NO: 10):
ATGGCTTGGGTGTGGACCTTGCTATTCCTGATGGCAGCTGCCCAAAGTGCCCAAGCACAGATC
CAGTTGGTGCAGTCTGGACCTGAGCTGAAGAAGCCTGGAGAGACAGTCAAGATCTCCTGCAAG
GCTTCTGGGTATACCTTCACAAACTATGGAATGAACTGGGTGAAGCAGGTTCCAGGAAAAGGT
TTAAGGTGGATGGGCTGGATGGACACCTTCACTGGAGAGCCAACATATGCTGATGACTTCAAG
GGACGGTTTGCCTTCTCTTTGGAAACCTCTGCCAGCACTGCCTATTTGCAGATCAACAGCCTCA
AAAATGAGGACACGGCTACTTATTTCTGTGCAAGAGGGGGGATTTTACGACTCAACTACTTTG
ACTACTGGGGCCAAGGCACCACTCTCACAGTCTCCTCAGCCAAAACGAAGGGCCCATCCGTCT
TCCCCCTGGCGCCCTGCTCCAGGAGCACCTCCGAGAGCACAGCCGCCCTGGGCTGCCTGGTCA
AGGACTACTTCCCCGAACCGGTGACGGTGTCGTGGAACTCAGGCGCCCTGACCAGCGGCGTGC
ACACCTTCCCGGCTGTCCTACAGTCCTCAGGACTCTACTCCCTCAGCAGCGTGGTGACCGTGCC
CTCCAGCAGCTTGGGCACGAAGACCTACACCTGCAACGTAGATCACAAGCCCAGCAACACCAA
GGTGGACAAGAGAGTTGAGTCCAAATATGGTCCCCCATGCCCACCCTGCCCAGCACCTGAGTT
CGAAGGGGGACCATCAGTCTTCCTGTTCCCCCCAAAACCCAAGGACACTCTCATGATCTCCCG
GACCCCTGAGGTCACGTGCGTGGTGGTGGACGTGAGCCAGGAAGACCCCGAGGTCCAGTTCAA
CTGGTACGTGGATGGCGTGGAGGTGCATAATGCCAAGACAAAGCCGCGGGAGGAGCAGTTCA
ACAGCACGTACCGTGTGGTCAGCGTCCTCACCGTCCTGCACCAGGACTGGCTGAACGGCAAGG
AGTACAAGTGCAAGGTCTCCAACAAAGGCCTCCCGTCCTCCATCGAGAAAACCATCTCCAAAG
CCAAAGGGCAGCCCCGAGAGCCACAGGTGTACACCCTGCCCCCATCCCAGGAGGAGATGACC
AAGAACCAGGTCAGCCTGACCTGCCTGGTCAAAGGCTTCTACCCCAGCGACATCGCCGTGGAG
TGGGAGAGCAATGGGCAGCCGGAGAACAACTACAAGACCACGCCTCCCGTGCTGGACTCCGA
CGGCTCCTTCTTCCTCTACAGCAGGCTAACCGTGGACAAGAGCAGGTGGCAGGAGGGGAATGT
CTTCTCATGCTCCGTGATGCATGAGGCTCTGCACAACCACTACACACAGAAGAGCCTCTCCCTG
TCTCTGGGTAAAGCTAGCTGATTAATTAA
Anti-ASGPR_4G2.2_Hv-V-hIgG4H-C (SEQ ID NO: 75):
MAWVWTLLFLMAAAQSAQAQIQLVQSGPELKKPGETVKISCKASGYTFTNYGMNWVKQVPGKG
LRWMGWMDTFTGEPTYADDFKGRFAFSLETSASTAYLQINSLKNEDTATYFCARGGILRLNYFDY
WGQGTTLTVSSAKTKGPSVFPLAPCSRSTSESTAALGCLVKDYFPEPVTVSWNSGALTSGVHTFPA
VLQSSGLYSLSSVVTVPSSSLGTKTYTCNVDHKPSNTKVDKRVESKYGPPCPPCPAPEFEGGPSVFL
FPPKPKDTLMISRTPEVTCVVVDVSQEDPEVQFNWYVDGVEVHNAKTKPREEQFNSTYRVVSVLT
VLHQDWLNGKEYKCKVSNKGLPSSIEKTISKAKGQPREPQVYTLPPSQEEMTKNQVSLTCLVKGFY
PSDIAVEWESNGQPENNYKTTPPVLDSDGSFFLYSRLTVDKSRWQEGNVFSCSVMHEALHNHYTQ
KSLSLSLGKAS
Anti-ASGPR_4G2.2_Kv-V-hIgGK-C (SEQ ID NO: 11):
ATGAAGTTTCCTTCTCAACTTCTGCTCTTACTGCTGTTTGGAATCCCAGGCATGATATGTGACAT
CCAGATGACACAATCTTCATCCTCCTTTTCTGTATCTCTAGGAGACAGAGTCACCATTACTTGC
AAGGCAAGTGAGGACATATATAATCGGTTAGGCTGGTATCAGCAGAAACCAGGAAATGCTCCT
AGGCTCTTAATATCTGGTGCAACCAGTTTGGAAACTGGGGTTCCTTCAAGATTCAGTGGCAGTG
GATCTGGAAAGGATTACGCTCTCAGCATTACCAGTCTTCAGACTGAAGATCTTGCTACTTATTA
CTGTCAACAGTGTTGGACTTCTCCGTACACGTTCGGAGGGGGGACCAAGCTCGAGATCAAACG
AACTGTGGCTGCACCATCTGTCTTCATCTTCCCGCCATCTGATGAGCAGTTGAAATCTGGAACT
GCCTCTGTTGTGTGCCTGCTGAATAACTTCTATCCCAGAGAGGCCAAAGTACAGTGGAAGGTG
GATAACGCCCTCCAATCGGGTAACTCCCAGGAGAGTGTCACAGAGCAGGACAGCAAGGACAG
CACCTACAGCCTCAGCAGCACCCTGACGCTGAGCAAAGCAGACTACGAGAAACACAAAGTCT
ATGCCTGCGAAGTCACCCATCAGGGCCTGAGCTCGCCCGTCACAAAGAGCTTCAACAGGGGAG
AGTGTTAG
Anti-ASGPR_4G2.2_Kv-V-hIgGK-C (SEQ ID NO: 76):
MKFPSQLLLLLLFGIPGMICDIQMTQSSSSFSVSLGDRVTITCKASEDIYNRLGWYQQKPGNAPRLLI
SGATSLETGVPSRFSGSGSGKDYALSITSLQTEDLATYYCQQCWTSPYTFGGGTKLEIKRTVAAPSV
FIFPPSDEQLKSGTASVVCLLNNFYPREAKVQWKVDNALQSGNSQESVTEQDSKDSTYSLSSTLTLS
KADYEKHKVYACEVTHQGLSSPVTKSFNRGEC
Anti-ASGPR_5F10H-LV-hIgG4H-C (SEQ ID NO: 12):
ATGGGATGGAGCTGGATCTTTCTCTTTCTCTTGTCAGGAACTGGAGGTGTCCTCTCTGAGGTCC
AGCTGCAACAGTCTGGACCTGAGCTGGTGAAGCCTGGGGCTTCAGTGAAGATGTCCTGCAAGG
CTTCTGGATACACCTTCACTGACTACTACATGAAGTGGGTGAAGCAGAGCCATGGAAAGAGCC
TTGAGTGGATTGGAGATATTAATCCTAACTATGGTGATACTTTCTACAACCAGAAGTTCGAGG
GCAAGGCCACATTGACTGTAGACAAATCCTCCAGGACAGCCTACATGCAGCTCAACAGCCTGA
CATCTGAGGACTCTGCAGTCTATTATTGTGGAAGAGGGGACTATGGATACTTCGATGTCTGGG
GCGCAGGGACCACGGTCACCGTCTCCTCAGCCAAAACAAAGGGCCCATCCGTCTTCCCCCTGG
CGCCCTGCTCCAGGAGCACCTCCGAGAGCACAGCCGCCCTGGGCTGCCTGGTCAAGGACTACT
TCCCCGAACCGGTGACGGTGTCGTGGAACTCAGGCGCCCTGACCAGCGGCGTGCACACCTTCC
CGGCTGTCCTACAGTCCTCAGGACTCTACTCCCTCAGCAGCGTGGTGACCGTGCCCTCCAGCAG
CTTGGGCACGAAGACCTACACCTGCAACGTAGATCACAAGCCCAGCAACACCAAGGTGGACA
AGAGAGTTGAGTCCAAATATGGTCCCCCATGCCCACCCTGCCCAGCACCTGAGTTCGAAGGGG
GACCATCAGTCTTCCTGTTCCCCCCAAAACCCAAGGACACTCTCATGATCTCCCGGACCCCTGA
GGTCACGTGCGTGGTGGTGGACGTGAGCCAGGAAGACCCCGAGGTCCAGTTCAACTGGTACGT
GGATGGCGTGGAGGTGCATAATGCCAAGACAAAGCCGCGGGAGGAGCAGTTCAACAGCACGT
ACCGTGTGGTCAGCGTCCTCACCGTCCTGCACCAGGACTGGCTGAACGGCAAGGAGTACAAGT
GCAAGGTCTCCAACAAAGGCCTCCCGTCCTCCATCGAGAAAACCATCTCCAAAGCCAAAGGGC
AGCCCCGAGAGCCACAGGTGTACACCCTGCCCCCATCCCAGGAGGAGATGACCAAGAACCAG
GTCAGCCTGACCTGCCTGGTCAAAGGCTTCTACCCCAGCGACATCGCCGTGGAGTGGGAGAGC
AATGGGCAGCCGGAGAACAACTACAAGACCACGCCTCCCGTGCTGGACTCCGACGGCTCCTTC
TTCCTCTACAGCAGGCTAACCGTGGACAAGAGCAGGTGGCAGGAGGGGAATGTCTTCTCATGC
TCCGTGATGCATGAGGCTCTGCACAACCACTACACACAGAAGAGCCTCTCCCTGTCTCTGGGT
AAAGCTAGCTGA
Anti-ASGPR_5F10H-LV-hIgG4H-C (SEQ ID NO: 77):
MGWSWIFLFLLSGTGGVLSEVQLQQSGPELVKPGASVKMSCKASGYTFTDYYMKWVKQSHGKSL
EWIGDINPNYGDIFYNQKFEGKATLTVDKSSRTAYMQLNSLTSEDSAVYYCGRGDYGYFDVWGA
GTTVTVSSAKTKGPSVFPLAPCSRSTSESTAALGCLVKDYFPEPVTVSWNSGALTSGVHTFPAVLQS
SGLYSLSSVVTVPSSSLGTKTYTCNVDHKPSNTKVDKRVESKYGPPCPPCPAPEFEGGPSVFLFPPKP
KDTLMISRTPEVTCVVVDVSQEDPEVQFNWYVDGVEVHNAKTKPREEQFNSTYRVVSVLTVLHQ
DWLNGKEYKCKVSNKGLPSSIEKTISKAKGQPREPQVYTLPPSQEEMTKNQVSLTCLVKGFYPSDI
AVEWESNGQPENNYKTTPPVLDSDGSFFLYSRLTVDKSRWQEGNVFSCSVMHEALHNHYTQKSLL
SLGKAS
Anti-ASGPR_5F10K-LV-hIgGK-C (SEQ ID NO: 13):
ATGGAGACACATTCTCAGGTCTTTGTATACATGTTGCTGTGGTTGTCTGGTGTTGAAGGAGACA
TTGTGATGACCCAGTCTCACAAATTCATGTCCACATCAGTAGGAGACAGGGTCAGCATCACCT
GCAAGGCCAGTCAGGATGTGGGTACTGCTGTAGCCTGGTATCAACAGAAACCAGGGCAATCTC
CTAAACTACTGATTTACTGGGCATCCACCCGGCACACTGGAGTCCCTGATCGCTTCACAGGCA
GTGGATCTGGGACAGATTTCACTCTCACCATTAACAATGTGCAGTCTGAAGACTTGGCAGATT
ATTTCTGTCAGCAATATAGCAGCAATCCGTACATGTTCGGAGGGGGGACCAAGCTCGAGATCA
AACGAACTGTGGCTGCACCATCTGTCTTCATCTTCCCGCCATCTGATGAGCAGTTGAAATCTGG
AACTGCCTCTGTTGTGTGCCTGCTGAATAACTTCTATCCCAGAGAGGCCAAAGTACAGTGGAA
GGTGGATAACGCCCTCCAATCGGGTAACTCCCAGGAGAGTGTCACAGAGCAGGACAGCAAGG
ACAGCACCTACAGCCTCAGCAGCACCCTGACGCTGAGCAAAGCAGACTACGAGAAACACAAA
GTCTATGCCTGCGAAGTCACCCATCAGGGCCTGAGCTCGCCCGTCACAAAGAGCTTCAACAGG
GGAGAGTGTTAG
Anti-ASGPR_5F10K-LV-hIgGK-C (SEQ ID NO: 78):
METHSQVFVYMLLWLSGVEGDIVMTQSHKFMSTSVGDRVSITCKASQDVGTAVAWYQQKPGQSP
KLLIYWASTRHTGVPDRFTGSGSGTDFTLTINNVQSEDLADYFCQQYSSNPYMFGGGTKLEIKRTV
AAPSVFIFPPSDEQLKSGTASVVCLLNNFYPREAKVQWKVDNALQSGNSQESVTEQDSKDSTYSLS
STLTLSKADYEKHKVYACEVTHQGLSSPVTKSFNRGEC
Anti-ASGPR1H11_H-V-hIgG4H-C (SEQ ID NO: 14):
ATGGGATGGAGCTGGATCTTTCTCTTTCTCCTGTCAGGAACTGCAGGTGTCCTCTCTGAGGTCC
AGCTGCAACAGTCTGGACCTGAGTTGGTGAAGCCTGGGGCTTCAGTGAAGATATCCTGCAAGA
CTTCTGGATACACATTCACTGAATACACCATGCACTGGGTGAGGCAGAGCCATGGAAAGAGCC
TTGAGTGGATTGGAGGTATTAATCCTATCAATGGTGGTCCTACCTACAACCAGAAGTTCAAGG
GCAAGGCCACATTGACTGTTGACAAGTCCTCCAGCACAGCCTACATGGAGCTCCGCAGCCTGA
CATCTGAGGACTCTGCAGTCTATTACTGTGCAAGATGGGACTATGGTAGTCGAGATGTTATGG
ACTACTGGGGTCAAGGAACCTCAGTCACCGTCTCCTCAGCCAAAACGAAGGGCCCATCCGTCT
TCCCCCTGGCGCCCTGCTCCAGGAGCACCTCCGAGAGCACAGCCGCCCTGGGCTGCCTGGTCA
AGGACTACTTCCCCGAACCGGTACCGGTGACGGTGTCGTGGAACTCAGGCGCCCTGACCAGCG
GCGTGCACACCTTCCCGGCTGTCCTACAGTCCTCAGGACTCTACTCCCTCAGCAGCGTGGTGAC
CGTGCCCTCCAGCAGCTTGGGCACGAAGACCTACACCTGCAACGTAGATCACAAGCCCAGCAA
CACCAAGGTGGACAAGAGAGTTGAGTCCAAATATGGTCCCCCATGCCCACCCTGCCCAGCACC
TGAGTTCGAAGGGGGACCATCAGTCTTCCTGTTCCCCCCAAAACCCAAGGACACTCTCATGAT
CTCCCGGACCCCTGAGGTCACGTGCGTGGTGGTGGACGTGAGCCAGGAAGACCCCGAGGTCCA
GTTCAACTGGTACGTGGATGGCGTGGAGGTGCATAATGCCAAGACAAAGCCGCGGGAGGAGC
AGTTCAACAGCACGTACCGTGTGGTCAGCGTCCTCACCGTCCTGCACCAGGACTGGCTGAACG
GCAAGGAGTACAAGTGCAAGGTCTCCAACAAAGGCCTCCCGTCCTCCATCGAGAAAACCATCT
CCAAAGCCAAAGGGCAGCCCCGAGAGCCACAGGTGTACACCCTGCCCCCATCCCAGGAGGAG
ATGACCAAGAACCAGGTCAGCCTGACCTGCCTGGTCAAAGGCTTCTACCCCAGCGACATCGCC
GTGGAGTGGGAGAGCAATGGGCAGCCGGAGAACAACTACAAGACCACGCCTCCCGTGCTGGA
CTCCGACGGCTCCTTCTTCCTCTACAGCAGGCTAACCGTGGACAAGAGCAGGTGGCAGGAGGG
GAATGTCTTCTCATGCTCCGTGATGCATGAGGCTCTGCACAACCACTACACACAGAAGAGCCT
CTCCCTGTCTCTGGGTAAAGCTAGCTGA
Anti-ASGPR1H11_H-V-hIgG4H-C (SEQ ID NO: 79):
MGWSWIFLFLLSGTAGVLSEVQLQQSGPELVKPGASVKISCKTSGYTFTEYTMHWVRSHGKSLEW
IGGINPINGGPTYNQKFKGKATLTVDKSSSTAYMELRSLTSEDSAVYYCARWDYGSRDVMDYWG
QGTSVTVSSAKTKGPSVFPLAPCSRSTSESTAALGCLVKDYFPEPVPVTVSWNSGALTSGVHTFPAV
LQSSGLYSLSSVVTVPSSSLGTKTYTCNVDHKPSNTKVDKRVESKYGPPCPPCPAPEFEGGPSVFLFP
PKPKDTLMISRTPEVTCVVVDVSQEDPEVQFNWYVDGVEVHNAKTKPREEQFNSTYRVVSVLTVL
HQDWLNGKEYKCKVSNKGLPSSIEKTISKAKGQPREPQVYTLPPSQEEMTKNQVSLTCLVKGFYPS
DIAVEWESNGQPENNYKTTPPVLDSDGSFFLYSRLTVDKSRWQEGNVFSCSVMHEALHNHYTQKS
LSLSLGKAS
Anti-ASGPR1H11K-LV-var2-hIgGK-C (SEQ ID NO: 15):
ATGGAATCACAGACTCTGGTCTTCATATCCATACTGCTCTGGTTATATGGTGCTGATGGGAACA
TTGTAATGACTCAATCTCCCAAATCCATGTCCATGTCAGTAGGGGAGAGGGTCACCTTGAGCT
GCAAGGCCAGTGAGAATGTGGGAACTTATGTATCCTGGTATCAACAGAGACCAGAACAGTCTC
CAAAACTGCTGATATACGGGGCATCCAACCGGTACACTGGGGTCCCCGATCGCTTCACAGGCA
GTGGATCTGCAACAGATTTCACTCTGACCATCAGCAGTGTGCAGGCTGAGGACCTTGCAGATT
ATCACTGTGGACAGACTTACAGCTATATATTCACGTTCGGCTCGGGGACAAAGCTCGAGATCA
AACGAACTGTGGCTGCACCATCTGTCTTCATCTTCCCGCCATCTGATGAGCAGTTGAAATCTGG
AACTGCCTCTGTTGTGTGCCTGCTGAATAACTTCTATCCCAGAGAGGCCAAAGTACAGTGGAA
GGTGGATAACGCCCTCCAATCGGGTAACTCCCAGGAGAGTGTCACAGAGCAGGACAGCAAGG
ACAGCACCTACAGCCTCAGCAGCACCCTGACGCTGAGCAAAGCAGACTACGAGAAACACAAA
GTCTATGCCTGCGAAGTCACCCATCAGGGCCTGAGCTCGCCCGTCACAAAGAGCTTCAACAGG
GGAGAGTGTTAG
Anti-ASGPR1H11K-LV-var2-hIgGK-C (SEQ ID NO: 80):
METHSQVFVYMLLWLSGVEGNIVMTQSPKSMSMSVGERVTLSCKASENVGTYVSWYQQRPEQSP
KLLIYGASNRYTGVPDRFTGSGSATDFTLTISSVQAEDLADYHCGQTYSYIFTFGSGTKLEIKRTVA
APSVFIFPPSDEQLKSGTASVVCLLNNFYPREAKVQWKVDNALQSGNSQESVTEQDSKDSTYSLSS
TLTLSKADYEKHKVYACEVTHQGLSSPVTKSFNRGEC
Anti-CD1d_2B5.3G10_H-V-hIgG4H-C (SEQ ID NO: 16):
ATGGGATGGAGCCGGATCTTTCTCTTCCTCCTGTCAATAACTGCAGGTGTCCATTGCCAGGTCC
AGGTGCAGCAGTCGGGACCTGAGTTGGTGAAGCCTGGGGCCTCAGTGAAGATTTCCTGCAAAG
CCTCTGGCGACGCATTCAGTAGTTCTTGGATGAACTGGGTGAAGCAGAGGCCTGGACAGGGTC
TTGAGTGGATTGGACGGATTTATCTTGGAGATGGAGATATTAATTACAATGGGAAGTTCAAGG
GCAGGGCCACACTGACTGCAGACAAATCCTCCAGCACAGCCTACATGCAGCTCAGCAGCCTGA
CCTCTGTGGACTCTGCGGTCTATTTCTGCGCGAGGCAGCTCGGGCTATGGTATGTTATGGACTA
CTGGGGTCAAGGAACCTCAGTCACCGTCTCCTCAGCCAAAACAAAGGGCCCATCCGTCTTCCC
CCTGGCGCCCTGCTCCAGGAGCACCTCCGAGAGCACAGCCGCCCTGGGCTGCCTGGTCAAGGA
CTACTTCCCCGAACCGGTGACGGTGTCGTGGAACTCAGGCGCCCTGACCAGCGGCGTGCACAC
CTTCCCGGCTGTCCTACAGTCCTCAGGACTCTACTCCCTCAGCAGCGTGGTGACCGTGCCCTCC
AGCAGCTTGGGCACGAAGACCTACACCTGCAACGTAGATCACAAGCCCAGCAACACCAAGGT
GGACAAGAGAGTTGAGTCCAAATATGGTCCCCCATGCCCACCCTGCCCAGCACCTGAGTTCGA
AGGGGGACCATCAGTCTTCCTGTTCCCCCCAAAACCCAAGGACACTCTCATGATCTCCCGGAC
CCCTGAGGTCACGTGCGTGGTGGTGGACGTGAGCCAGGAAGACCCCGAGGTCCAGTTCAACTG
GTACGTGGATGGCGTGGAGGTGCATAATGCCAAGACAAAGCCGCGGGAGGAGCAGTTCAACA
GCACGTACCGTGTGGTCAGCGTCCTCACCGTCCTGCACCAGGACTGGCTGAACGGCAAGGAGT
ACAAGTGCAAGGTCTCCAACAAAGGCCTCCCGTCCTCCATCGAGAAAACCATCTCCAAAGCCA
AAGGGCAGCCCCGAGAGCCACAGGTGTACACCCTGCCCCCATCCCAGGAGGAGATGACCAAG
AACCAGGTCAGCCTGACCTGCCTGGTCAAAGGCTTCTACCCCAGCGACATCGCCGTGGAGTGG
GAGAGCAATGGGCAGCCGGAGAACAACTACAAGACCACGCCTCCCGTGCTGGACTCCGACGG
CTCCTTCTTCCTCTACAGCAGGCTAACCGTGGACAAGAGCAGGTGGCAGGAGGGGAATGTCTT
CTCATGCTCCGTGATGCATGAGGCTCTGCACAACCACTACACACAGAAGAGCCTCTCCCTGTCT
CTGGGTAAAGCTAGCTGA
Anti-CD1d_2B5.3G10_H-V-hIgG4H-C (SEQ ID NO: 81):
MGWSRIFLFLLSITAGVHCQVQVQQSGPELVKPGASVKISCKASGDAFSSSWMNWVKQRPGQGLE
WIGRIYLGDGDINYNGKFKGRATLTADKSSSTAYMQLSSLTSVDSAVYFCARQLGLWYVMDYWG
QGTSVTVSSAKTKGPSVFPLAPCSRSTSESTAALGCLVKDYFPEPVTVSWNSGALTSGVHTFPAVLQ
SSGLYSLSSVVTVPSSSLGTKTYTCNVDHKPSNTKVDKRVESKYGPPCPPCPAPEFEGGPSVFLFPPK
PKDTLMISRTPEVTCVVVDVSQEDPEVQFNWYVDGVEVHNAKTKPREEQFNSTYRVVSVLTVLHQ
DWLNGKEYKCKVSNKGLPSSIEKTISKAKGQPREPQVYTLPPSQEEMTKNQVSLTCLVKGFYPSDI
AVEWESNGQPENNYKTTPPVLDSDGSFFLYSRLTVDKSRWQEGNVFSCSVMHEALHNHYTQKSLS
LSLGKAS
Anti-CD1d_2B5.3G10_K-V-hIgGK-C (SEQ ID NO: 17):
ATGAGTGTGCCCACTCAGGTCCTGGGGTTGCTGCTGCTGTGGCTTACAGGTGCCAGATGTGAC
ATCCAGATGGCTCAGTCTCCAGCCTCCCTATCTGCATCTGTGGGAGAAACTGTCACCATCACAT
GTCGAGCAAGTGAGAATATTTACAGTTATTTAGCATGGTATCAGCAGAAACAGGGAAAATCTC
CTCAGCTCCTGGTCTATAATGCAAAAACCTTAGCAGAAGGTGTGCCATCAAGGTTCAGTGGCA
GTGGATCAGGCACACAGTTTTCTCTGAAGATCAACAGCCTGCAGCCTGAAGATTTTGGGAGTT
ATTACTGTCAACATCATTATGGTTTTCCGTGGACGTTCGGTGGAGGCACCAAGCTCGAGATCAA
ACGAACTGTGGCTGCACCATCTGTCTTCATCTTCCCGCCATCTGATGAGCAGTTGAAATCTGGA
ACTGCCTCTGTTGTGTGCCTGCTGAATAACTTCTATCCCAGAGAGGCCAAAGTACAGTGGAAG
GTGGATAACGCCCTCCAATCGGGTAACTCCCAGGAGAGTGTCACAGAGCAGGACAGCAAGGA
CAGCACCTACAGCCTCAGCAGCACCCTGACGCTGAGCAAAGCAGACTACGAGAAACACAAAG
TCTATGCCTGCGAAGTCACCCATCAGGGCCTGAGCTCGCCCGTCACAAAGAGCTTCAACAGGG
GAGAGTGTTAG
Anti-CD1d_2B5.3G10_K-V-hIgGK-C (SEQ ID NO: 82):
MSVPTQVLGLLLLWLTGARCDIQMAQSPASLSASVGETVTITCRASENIYSYLAWYQQKQGKSPQL
LVYNAKTLAEGVPSRFSGSGSGTQFSLKINSLQPEDFGSYYCQHHYGFPWTFGGGTKLEIKRTVAA
PSVFIFPPSDEQLKSGTASVVCLLNNFYPREAKVQWKVDNALQSGNSQESVTEQDSKDSTYSLSSTL
TLSKADYEKHKVYACEVTHQGLSSPVTKSFNRGEC
Anti-CD1d_2H11.2G5_H-V-hIgG4H-C (SEQ ID NO: 18):
ATGAACTTCGGGCTCAGCTTGATTTTCCTTGTCCTCATTTTAAAAGGTGTCCAGTGTGAGGTGC
AGCTGGTGGAGTCTGGGGGAGACTTAGTGAAGCCTGGAGGGTCCCTGAAACTCTCCTGTGCAG
CCTCTGGATTCACTTTCAGTAGCTATGGCATGTCTTGGGTTCGCCAGACTCCAGACAAGAGGCT
GGAGTGGGTCGCAGTCATTAGTAGTGGTGGAAGTTCCACCTTCTATCCAGACAGTGTGAAGGG
GCGATTCACCATCTCCAGAGACAATGCCAAGAACACCCTGTACCTGCAAATGAGCAGTCTGAA
GTCTGAGGACACAGCCGTGTATTACTGTTCAAGAGGAGGTTACTACTTTGACTACTGGGGCCA
AGGCACCACTCTCACAGTCTCCGCAGCCAAAACAAAGGGCCCATCCGTCTTCCCCCTGGCGCC
CTGCTCCAGGAGCACCTCCGAGAGCACAGCCGCCCTGGGCTGCCTGGTCAAGGACTACTTCCC
CGAACCGGTGACGGTGTCGTGGAACTCAGGCGCCCTGACCAGCGGCGTGCACACCTTCCCGGC
TGTCCTACAGTCCTCAGGACTCTACTCCCTCAGCAGCGTGGTGACCGTGCCCTCCAGCAGCTTG
GGCACGAAGACCTACACCTGCAACGTAGATCACAAGCCCAGCAACACCAAGGTGGACAAGAG
AGTTGAGTCCAAATATGGTCCCCCATGCCCACCCTGCCCAGCACCTGAGTTCGAAGGGGGACC
ATCAGTCTTCCTGTTCCCCCCAAAACCCAAGGACACTCTCATGATCTCCCGGACCCCTGAGGTC
ACGTGCGTGGTGGTGGACGTGAGCCAGGAAGACCCCGAGGTCCAGTTCAACTGGTACGTGGAT
GGCGTGGAGGTGCATAATGCCAAGACAAAGCCGCGGGAGGAGCAGTTCAACAGCACGTACCG
TGTGGTCAGCGTCCTCACCGTCCTGCACCAGGACTGGCTGAACGGCAAGGAGTACAAGTGCAA
GGTCTCCAACAAAGGCCTCCCGTCCTCCATCGAGAAAACCATCTCCAAAGCCAAAGGGCAGCC
CCGAGAGCCACAGGTGTACACCCTGCCCCCATCCCAGGAGGAGATGACCAAGAACCAGGTCA
GCCTGACCTGCCTGGTCAAAGGCTTCTACCCCAGCGACATCGCCGTGGAGTGGGAGAGCAATG
GGCAGCCGGAGAACAACTACAAGACCACGCCTCCCGTGCTGGACTCCGACGGCTCCTTCTTCC
TCTACAGCAGGCTAACCGTGGACAAGAGCAGGTGGCAGGAGGGGAATGTCTTCTCATGCTCCG
TGATGCATGAGGCTCTGCACAACCACTACACACAGAAGAGCCTCTCCCTGTCTCTGGGTAAAG
CTAGCTGA
Anti-CD1d_2H11.2G5_H-V-hIgG4H-C (SEQ ID NO: 83):
MNFGLSLIFLVLILKGVQCEVQLVESGGDLVKPGGSLKLSCAASGFTFSSYGMSWVRQTPDKRLEW
VAVISSGGSSTFYPDSVKGRFTISRDNAKNTLYLQMSSLKSEDTAVYYCSRGGYYFDYWGQGTTLT
VSAAKTKGPSVFPLAPCSRSTSESTAALGCLVKDYFPEPVTVSWNSGALTSGVHTFPAVLQSSGLYS
LSSVVTVPSSSLGTKTYTCNVDHKPSNTKVDKRVESKYGPPCPPCPAPEFEGGPSVFLFPPKPKDTL
MISRTPEVTCVVVDVSQEDPEVQFNWYVDGVEVHNAKTKPREEQFNSTYRVVSVLTVLHQDWLN
GKEYKCKVSNKGLPSSIEKTISKAKGQPREPQVYTLPPSQEEMTKNQVSLTCLVKGFYPSDIAVEWE
SNGQPENNYKTTPPVLDSDGSFFLYSRLTVDKSRWQEGNVFSCSVMHEALHNHYTQKSLSLSLGK
AS
Anti-CD1d_2H11.2G5_K-V-hIgGK-C (SEQ ID NO: 19):
ATGAGGTTCCAGGTTCAGGTTCTGGGGCTCCTTCTGCTCTGGATATCAGGTGCCCAGTGTGATG
TCCAGATAACCCAGTCTCCATCTTATCTTGCTGCATCTCCTGGAGAAACCATTACTATTAATTG
CAGGGCAAGCAAGACCATTAGCAAATATTTAGCCTGGTATCAAGAGAAACCTGAGAAAACTG
ATAAGCTTCTTATCTACTCTGGATCCACTTTGCAATCTGGAATTCCATCAAGGTTCAGTGGCAG
TGGATCTGGTACAGATTTCACTCTCACCATCAGTGGCCTGGAGCCTGAAGATTTTGCAATGTAT
TACTGTCAACAGCATAATGAATACCCGTGGACGTTCGGTGGAGGCACCAAGCTCGAGATCAAA
CGAACTGTGGCTGCACCATCTGTCTTCATCTTCCCGCCATCTGATGAGCAGTTGAAATCTGGAA
CTGCCTCTGTTGTGTGCCTGCTGAATAACTTCTATCCCAGAGAGGCCAAAGTACAGTGGAAGG
TGGATAACGCCCTCCAATCGGGTAACTCCCAGGAGAGTGTCACAGAGCAGGACAGCAAGGAC
AGCACCTACAGCCTCAGCAGCACCCTGACGCTGAGCAAAGCAGACTACGAGAAACACAAAGT
CTATGCCTGCGAAGTCACCCATCAGGGCCTGAGCTCGCCCGTCACAAAGAGCTTCAACAGGGG
AGAGTGTTAG
Anti-CD1d_2H11.2G5_K-V-hIgGK-C (SEQ ID NO: 84):
MRFQVQVLGLLLLWISGAQCDVQITQSPSYLAASPGETITINCRASKTISKYLAWYQEKPEKTDKLL
IYSGSTLQSGIPSRFSGSGSGTDFTLTISGLEPEDFAMYYCQQHNEYPWTFGGGTKLEIKRTVAAPSV
FIFPPSDEQLKSGTASVVCLLNNFYPREAKVQWKVDNALQSGNSQESVTEQDSKDSTYSLSSTLTLS
KADYEKHKVYACEVTHQGLSSPVTKSFNRGEC
Anti-CD40_11B6.1C3_H-LV-hIgG4H-C (SEQ ID NO: 20):
ATGGGATGGAGCTGGATCTTTCTCTTTCTCCTGTCAGGAACTGCAGGTGTCCTCTCTGAGGTCC
AGCTGCAACAGTCTGGACCTGAGCTGGTGAAGCCTGGGGCTTCAGTGAAGATATCCTGCAAGG
CTTCTGGTTACTCATTCACTGGCTACTACATGCACTGGGTGAAGCAAAGCCATGTAAAGAGCCT
TGAGTGGATTGGACGTATTAATCCTTACAATGGTGCTACTAGCTACAACCAGAATTTCAAGGA
CAAGGCCAGCTTGACTGTAGATAAGTCCTCCAGCACAGCCTACATGGAGCTCCACAGCCTGAC
ATCTGAGGACTCTGCAGTCTATTACTGTGCAAGAGAGGACTACGTCTACTGGGGCCAAGGCAC
CACTCTCACAGTCTCCTCAGCCAAAACGAAGGGCCCATCCGTCTTCCCCCTGGCGCCCTGCTCC
AGGAGCACCTCCGAGAGCACAGCCGCCCTGGGCTGCCTGGTCAAGGACTACTTCCCCGAACCG
GTGACGGTGTCGTGGAACTCAGGCGCCCTGACCAGCGGCGTGCACACCTTCCCGGCTGTCCTA
CAGTCCTCAGGACTCTACTCCCTCAGCAGCGTGGTGACCGTGCCCTCCAGCAGCTTGGGCACG
AAGACCTACACCTGCAACGTAGATCACAAGCCCAGCAACACCAAGGTGGACAAGAGAGTTGA
GTCCAAATATGGTCCCCCATGCCCACCCTGCCCAGCACCTGAGTTCGAAGGGGGACCATCAGT
CTTCCTGTTCCCCCCAAAACCCAAGGACACTCTCATGATCTCCCGGACCCCTGAGGTCACGTGC
GTGGTGGTGGACGTGAGCCAGGAAGACCCCGAGGTCCAGTTCAACTGGTACGTGGATGGCGTG
GAGGTGCATAATGCCAAGACAAAGCCGCGGGAGGAGCAGTTCAACAGCACGTACCGTGTGGT
CAGCGTCCTCACCGTCCTGCACCAGGACTGGCTGAACGGCAAGGAGTACAAGTGCAAGGTCTC
CAACAAAGGCCTCCCGTCCTCCATCGAGAAAACCATCTCCAAAGCCAAAGGGCAGCCCCGAG
AGCCACAGGTGTACACCCTGCCCCCATCCCAGGAGGAGATGACCAAGAACCAGGTCAGCCTG
ACCTGCCTGGTCAAAGGCTTCTACCCCAGCGACATCGCCGTGGAGTGGGAGAGCAATGGGCAG
CCGGAGAACAACTACAAGACCACGCCTCCCGTGCTGGACTCCGACGGCTCCTTCTTCCTCTACA
GCAGGCTAACCGTGGACAAGAGCAGGTGGCAGGAGGGGAATGTCTTCTCATGCTCCGTGATGC
ATGAGGCTCTGCACAACCACTACACACAGAAGAGCCTCTCCCTGTCTCTGGGTAAAGCTAGCT
GA
Anti-CD40_11B6.1C3_H-LV-hIgG4H-C (SEQ ID NO: 85):
MGWSWIFLFLLSGTAGVLSEVQLQQSGPELVKPGASVKISCKASGYSFTGYYMHWVKQSHVKSLE
WIGRINPYNGATSYNQNFKDKASLTVDKSSSTAYMELHSLTSEDSAVYYCAREDYVYWGQGTTLT
VSSAKTKGPSVFPLAPCSRSTSESTAALGCLVKDYFPEPVTVSWNSGALTSGVHTFPAVLQSSGLYS
LSSVVTVPSSSLGTKTYTCNVDHKPSNTKVDKRVESKYGPPCPPCPAPEFEGGPSVFLFPPKPKDTL
MISRTPEVTCVVVDVSQEDPEVQFNWYVDGVEVHNAKTKPREEQFNSTYRVVSVLTVLHQDWLN
GKEYKCKVSNKGLPSSIEKTISKAKGQPREPQVYTLPPSQEEMTKNQVSLTCLVKGFYPSDIAVEWE
SNGQPENNYKTTPPVLDSDGSFFLYSRLTVDKSRWQEGNVFSCSVMHEALHNHYTQKSLSLSLGK
AS
Anti-CD40_11B6.1C3_K-LV-hIgGK-C (SEQ ID NO: 21):
ATGAAGTTGCCTGTTAGGCTGTTGGTGCTGATGTTCTGGATTCCTGCTTCCAGCAGTGATGTTG
TGATGACCCAAACTCCACTCTCCCTGCCTGTCAGTCTTGGAGATCAAGCCTCCATCTCTTGCAG
ATCTAGTCAGAGCCTTGTACACAGTAATGGAAACACCTATTTACATTGGTACCTGCAGAAGCC
AGGCCAGTCTCCAAAGCTCCTGATCTACAAAGTTTCCAACCGATTTTCTGGGGTCCCAGACAG
GTTCAGTGGCAGTGGATCAGGGACAGATTTCGCACTCAAGATCAGTAGAGTGGAGGCTGAGG
ATCTGGGAGTTTATTTCTGCTCTCAAAGTACACATGTTCCGTGGACGTTCGGTGGAGGCACCAA
GCTCGAGATCAAACGAACTGTGGCTGCACCATCTGTCTTCATCTTCCCGCCATCTGATGAGCAG
TTGAAATCTGGAACTGCCTCTGTTGTGTGCCTGCTGAATAACTTCTATCCCAGAGAGGCCAAAG
TACAGTGGAAGGTGGATAACGCCCTCCAATCGGGTAACTCCCAGGAGAGTGTCACAGAGCAG
GACAGCAAGGACAGCACCTACAGCCTCAGCAGCACCCTGACGCTGAGCAAAGCAGACTACGA
GAAACACAAAGTCTATGCCTGCGAAGTCACCCATCAGGGCCTGAGCTCGCCCGTCACAAAGAG
CTTCAACAGGGGAGAGTGTTAG
Anti-CD40_11B6.1C3_K-LV-hIgGK-C (SEQ ID NO: 86):
MKLPVRLLVLMFWIPASSSDVVMTQTPLSLPVSLGDQASISCRSSQSLVHSNGNTYLHWYLQKPGQ
SPKLLIYKVSNRFSGVPDRFSGSGSGTDFALKISRVEAEDLGVYFCSQSTHVPWTFGGGTKLEIKRT
VAAPSVFIFPPSDEQLKSGTASVVCLLNNFYPREAKVQWKVDNALQSGNSQESVTEQDSKDSTYSL
SSTLTLSKADYEKHKVYACEVTHQGLSSPVTKSFNRGEC
Anti-CD40_12B4.2C10_H-LV-hIgG4H-C (SEQ ID NO: 22):
ATGGAATGGAGTTGGATATTTCTCTTTCTTCTGTCAGGAACTGCAGGTGTCCACTCTGAGGTCC
AGCTGCAGCAGTCTGGACCTGAGCTGGTAAAGCCTGGGGCTTCAGTGAAGATGTCCTGCAAGG
CTTCTGGATACACATTCACTGACTATGTTTTGCACTGGGTGAAACAGAAGCCTGGGCAGGGCC
TTGAGTGGATTGGATATATTAATCCTTACAATGATGGTACTAAGTACAATGAGAAGTTCAAAG
GCAAGGCCACACTGACTTCAGACAAATCCTCCAGCACAGCCTACATGGAGCTCAGCAGCCTGA
CCTCTGAGGACTCTGCGGTCTATTACTGTGCAAGGGGCTATCCGGCCTACTCTGGGTATGCTAT
GGACTACTGGGGTCAAGGAACCTCAGTCACCGTCTCCTCAGCCAAAACGAAGGGCCCATCCGT
CTTCCCCCTGGCGCCCTGCTCCAGGAGCACCTCCGAGAGCACAGCCGCCCTGGGCTGCCTGGT
CAAGGACTACTTCCCCGAACCGGTGACGGTGTCGTGGAACTCAGGCGCCCTGACCAGCGGCGT
GCACACCTTCCCGGCTGTCCTACAGTCCTCAGGACTCTACTCCCTCAGCAGCGTGGTGACCGTG
CCCTCCAGCAGCTTGGGCACGAAGACCTACACCTGCAACGTAGATCACAAGCCCAGCAACACC
AAGGTGGACAAGAGAGTTGAGTCCAAATATGGTCCCCCATGCCCACCCTGCCCAGCACCTGAG
TTCGAAGGGGGACCATCAGTCTTCCTGTTCCCCCCAAAACCCAAGGACACTCTCATGATCTCCC
GGACCCCTGAGGTCACGTGCGTGGTGGTGGACGTGAGCCAGGAAGACCCCGAGGTCCAGTTCA
ACTGGTACGTGGATGGCGTGGAGGTGCATAATGCCAAGACAAAGCCGCGGGAGGAGCAGTTC
AACAGCACGTACCGTGTGGTCAGCGTCCTCACCGTCCTGCACCAGGACTGGCTGAACGGCAAG
GAGTACAAGTGCAAGGTCTCCAACAAAGGCCTCCCGTCCTCCATCGAGAAAACCATCTCCAAA
GCCAAAGGGCAGCCCCGAGAGCCACAGGTGTACACCCTGCCCCCATCCCAGGAGGAGATGAC
CAAGAACCAGGTCAGCCTGACCTGCCTGGTCAAAGGCTTCTACCCCAGCGACATCGCCGTGGA
GTGGGAGAGCAATGGGCAGCCGGAGAACAACTACAAGACCACGCCTCCCGTGCTGGACTCCG
ACGGCTCCTTCTTCCTCTACAGCAGGCTAACCGTGGACAAGAGCAGGTGGCAGGAGGGGAATG
TCTTCTCATGCTCCGTGATGCATGAGGCTCTGCACAACCACTACACACAGAAGAGCCTCTCCCT
GTCTCTGGGTAAAGCTAGCTGA
Anti-CD40_12B4.2C10_H-LV-hIgG4H-C (SEQ ID NO: 87):
MEWSWIFLFLLSGTAGVHSEVQLQQSGPELVKPGASVKMSCKASGYTFTDYVLHWVKQKPGQGL
EWIGYINPYNDGTKYNEKFKGKATLTSDKSSSTAYMELSSLTSEDSAVYYCARGYPAYSGYAMDY
WGQGTSVTVSSAKTKGPSVFPLAPCSRSTSESTAALGCLVKDYFPEPVTVSWNSGALTSGVHTFPA
VLQSSGLYSLSSVVTVPSSSLGTKTYTCNVDHKPSNTKVDKRVESKYGPPCPPCPAPEFEGGPSVFL
FPPKPKDTLMISRTPEVTCVVVDVSQEDPEVQFNWYVDGVEVHNAKTKPREEQFNSTYRVVSVLT
VLHQDWLNGKEYKCKVSNKGLPSSIEKTISKAKGQPREPQVYTLPPSQEEMTKNQVSLTCLVKGFY
PSDIAVEWESNGQPENNYKTTPPVLDSDGSFFLYSRLTVDKSRWQEGNVFSCSVMHEALHNHYTQ
KSLSLSLGKAS
Anti-CD40_12B4.2C10_K-LV-v2-hIgGK-C (SEQ ID NO: 23):
ATGATGTCCTCTGCTCAGTTCCTTGGTCTCCTGTTGCTCTGTTTTCAAGGTACCAGATGTGATAT
CCAGATGACACAGACTACATCCTCCCTGTCTGCCTCTCTGGGAGACAGAGTCACCATCAGTTGC
AGGGCAAGTCAGGACATTAGCAATTATTTAAACTGGTATCAGCAGAAACCAGATGGAACTGTT
AAACTCCTGATCTACTACACATCAAGATTACACTCAGGAGTCCCATCAAGGTTCAGTGGCAGT
GGGTCTGGAACAGATTATTCTCTCACCATTAGCAACCTGGAGCAAGAAGATATTGCCACTTAC
TTTTGCCATCATGGTAATACGCTTCCGTGGACGTTCGGTGGAGGCACCAAGCTCGAGATCAAA
CGAACTGTGGCTGCACCATCTGTCTTCATCTTCCCGCCATCTGATGAGCAGTTGAAATCTGGAA
CTGCCTCTGTTGTGTGCCTGCTGAATAACTTCTATCCCAGAGAGGCCAAAGTACAGTGGAAGG
TGGATAACGCCCTCCAATCGGGTAACTCCCAGGAGAGTGTCACAGAGCAGGACAGCAAGGAC
AGCACCTACAGCCTCAGCAGCACCCTGACGCTGAGCAAAGCAGACTACGAGAAACACAAAGT
CTATGCCTGCGAAGTCACCCATCAGGGCCTGAGCTCGCCCGTCACAAAGAGCTTCAACAGGGG
AGAGTGTTAG
Anti-CD40_12B4.2C10_K-LV-v2-hIgGK-C (SEQ ID NO: 88):
MMSSAQFLGLLLLCFQGTRCDIQMTQTTSSLSASLGDRVTISCRASQDISNYLNWYQQKPDGTVKL
LIYYTSRLHSGVPSRFSGSGSGTDYSLTISNLEQEDIATYFCHHGNTLPWTFGGGTKLEIKRTVAAPS
VFIFPPSDEQLKSGTASVVCLLNNFYPREAKVQWKVDNALQSGNSQESVTEQDSKDSTYSLSSTLT
LSKADYEKHKVYACEVTHQGLSSPVTKSFNRGEC
Anti-CD40_12E12.3F3_H-V-hIgG4H-C (SEQ ID NO: 24):
ATGAACTTGGGGCTCAGCTTGATTTTCCTTGTCCTTGTTTTAAAAGGTGTCCAGTGTGAAGTGA
AGCTGGTGGAGTCTGGGGGAGGCTTAGTGCAGCCTGGAGGGTCCCTGAAACTCTCCTGTGCAA
CCTCTGGATTCACTTTCAGTGACTATTACATGTATTGGGTTCGCCAGACTCCAGAGAAGAGGCT
GGAGTGGGTCGCATACATTAATTCTGGTGGTGGTAGCACCTATTATCCAGACACTGTAAAGGG
CCGATTCACCATCTCCAGAGACAATGCCAAGAACACCCTGTACCTGCAAATGAGCCGGCTGAA
GTCTGAGGACACAGCCATGTATTACTGTGCAAGACGGGGGTTACCGTTCCATGCTATGGACTA
TTGGGGTCAAGGAACCTCAGTCACCGTCTCCTCAGCCAAAACGAAGGGCCCATCCGTCTTCCC
CCTGGCGCCCTGCTCCAGGAGCACCTCCGAGAGCACAGCCGCCCTGGGCTGCCTGGTCAAGGA
CTACTTCCCCGAACCGGTGACGGTGTCGTGGAACTCAGGCGCCCTGACCAGCGGCGTGCACAC
CTTCCCGGCTGTCCTACAGTCCTCAGGACTCTACTCCCTCAGCAGCGTGGTGACCGTGCCCTCC
AGCAGCTTGGGCACGAAGACCTACACCTGCAACGTAGATCACAAGCCCAGCAACACCAAGGT
GGACAAGAGAGTTGAGTCCAAATATGGTCCCCCATGCCCACCCTGCCCAGCACCTGAGTTCGA
AGGGGGACCATCAGTCTTCCTGTTCCCCCCAAAACCCAAGGACACTCTCATGATCTCCCGGAC
CCCTGAGGTCACGTGCGTGGTGGTGGACGTGAGCCAGGAAGACCCCGAGGTCCAGTTCAACTG
GTACGTGGATGGCGTGGAGGTGCATAATGCCAAGACAAAGCCGCGGGAGGAGCAGTTCAACA
GCACGTACCGTGTGGTCAGCGTCCTCACCGTCCTGCACCAGGACTGGCTGAACGGCAAGGAGT
ACAAGTGCAAGGTCTCCAACAAAGGCCTCCCGTCCTCCATCGAGAAAACCATCTCCAAAGCCA
AAGGGCAGCCCCGAGAGCCACAGGTGTACACCCTGCCCCCATCCCAGGAGGAGATGACCAAG
AACCAGGTCAGCCTGACCTGCCTGGTCAAAGGCTTCTACCCCAGCGACATCGCCGTGGAGTGG
GAGAGCAATGGGCAGCCGGAGAACAACTACAAGACCACGCCTCCCGTGCTGGACTCCGACGG
CTCCTTCTTCCTCTACAGCAGGCTAACCGTGGACAAGAGCAGGTGGCAGGAGGGGAATGTCTT
CTCATGCTCCGTGATGCATGAGGCTCTGCACAACCACTACACACAGAAGAGCCTCTCCCTGTCT
CTGGGTAAAGCTAGCTGA
Anti-CD40_12E12.3F3_H-V-hIgG4H-C (SEQ ID NO: 89):
MNLGLSLIFLVLVLKGVQCEVKLVESGGGLVQPGGSLKLSCATSGFTFSDYYMYWVRQTPEKRLE
WVAYINSGGGSTYYPDTVKGRFTISRDNAKNTLYLQMSRLKSEDTAMYYCARRGLPFHAMDYWG
QGTSVTVSSAKTKGPSVFPLAPCSRSTSESTAALGCLVKDYFPEPVTVSWNSGALTSGVHTFPAVLQ
SSGLYSLSSVVTVPSSSLGTKTYTCNVDHKPSNTKVDKRVESKYGPPCPPCPAPEFEGGPSVFLFPPK
PKDTLMISRTPEVTCVVVDVSQEDPEVQFNWYVDGVEVHNAKTKPREEQFNSTYRVVSVLTVLHQ
DWLNGKEYKCKVSNKGLPSSIEKTISKAKGQPREPQVYTLPPSQEEMTKNQVSLTCLVKGFYPSDI
AVEWESNGQPENNYKTTPPVLDSDGSFFLYSRLTVDKSRWQEGNVFSCSVMHEALHNHYTQKSLS
LSLGKAS
Anti-CD40_12E12.3F3_K-LV-hIgGK-C (SEQ ID NO: 25):
ATGATGTCCTCTGCTCAGTTCCTTGGTCTCCTGTTGCTCTGTTTTCAAGGTACCAGATGTGATAT
CCAGATGACACAGACTACATCCTCCCTGTCTGCCTCTCTAGGAGACAGAGTCACCATCAGTTGC
AGTGCAAGTCAGGGCATTAGCAATTATTTAAACTGGTATCAGCAGAAACCAGATGGAACTGTT
AAACTCCTGATCTATTACACATCAATTTTACACTCAGGAGTCCCATCAAGGTTCAGTGGCAGTG
GGTCTGGGACAGATTATTCTCTCACCATCGGCAACCTGGAACCTGAAGATATTGCCACTTACTA
TTGTCAGCAGTTTAATAAGCTTCCTCCGACGTTCGGTGGAGGCACCAAACTCGAGATCAAACG
AACTGTGGCTGCACCATCTGTCTTCATCTTCCCGCCATCTGATGAGCAGTTGAAATCTGGAACT
GCCTCTGTTGTGTGCCTGCTGAATAACTTCTATCCCAGAGAGGCCAAAGTACAGTGGAAGGTG
GATAACGCCCTCCAATCGGGTAACTCCCAGGAGAGTGTCACAGAGCAGGACAGCAAGGACAG
CACCTACAGCCTCAGCAGCACCCTGACGCTGAGCAAAGCAGACTACGAGAAACACAAAGTCT
ATGCCTGCGAAGTCACCCATCAGGGCCTGAGCTCGCCCGTCACAAAGAGCTTCAACAGGGGAG
AGTGTTAG
Anti-CD40_12E12.3F3_K-LV-hIgGK-C (SEQ ID NO: 90):
MMSSAQFLGLLLLCFQGTRCDIQMTQTTSSLSASLGDRVTISCSASQGISNYLNWYQQKPDGTVKL
LIYYTSILHSGVPSRFSGSGSGTDYSLTIGNLEPEDIATYYCQQFNKLPPTFGGGTKLEIKRTVAAPSV
FIFPPSDEQLKSGTASVVCLLNNFYPREAKVQWKVDNALQSGNSQESVTEQDSKDSTYSLSSTLTLS
KADYEKHKVYACEVTHQGLSSPVTKSFNRGEC
Anti-DCIR_24A5.4A5_H-V-hIgG4H-C (SEQ ID NO: 26):
ATGGATTGGCTGTGGAACTTGCTATTCCTGATGGCAGCTGCCCAAAGTGCCCAAGCACAGATC
CAGTTGGTGCAGTCTGGACCTGAGCTGAAGAAGCCTGGAGAGACAGTCAAGATCTCCTGCAAG
GCTTCTGGGTATTCCTTCACAAACTATGGAATGAACTGGGTGAAACAGGCTCCAGGAAAGGGT
TTAAAGTGGATGGGCTGGATAAACACCTACACTGGAGAGTCAACATATGCTGATGACTTCAAG
GGACGGTTTGCCTTCTCTTTGGAAACCTCTGCCAGCACTGCCTATTTGCAGATCAGTAACCTCA
AAAATGAGGACATGGCTACATATTTCTGTGCTAGAGGGGACTTTAGGTACTACTATTTTGACTA
CTGGGGCCAAGGCACCACTCTCACAGGCTCCTCAGCCAAAACGAAGGGCCCATCCGTCTTCCC
CCTGGCGCCCTGCTCCAGGAGCACCTCCGAGAGCACAGCCGCCCTGGGCTGCCTGGTCAAGGA
CTACTTCCCCGAACCGGTGACGGTGTCGTGGAACTCAGGCGCCCTGACCAGCGGCGTGCACAC
CTTCCCGGCTGTCCTACAGTCCTCAGGACTCTACTCCCTCAGCAGCGTGGTGACCGTGCCCTCC
AGCAGCTTGGGCACGAAGACCTACACCTGCAACGTAGATCACAAGCCCAGCAACACCAAGGT
GGACAAGAGAGTTGAGTCCAAATATGGTCCCCCATGCCCACCCTGCCCAGCACCTGAGTTCGA
AGGGGGACCATCAGTCTTCCTGTTCCCCCCAAAACCCAAGGACACTCTCATGATCTCCCGGAC
CCCTGAGGTCACGTGCGTGGTGGTGGACGTGAGCCAGGAAGACCCCGAGGTCCAGTTCAACTG
GTACGTGGATGGCGTGGAGGTGCATAATGCCAAGACAAAGCCGCGGGAGGAGCAGTTCAACA
GCACGTACCGTGTGGTCAGCGTCCTCACCGTCCTGCACCAGGACTGGCTGAACGGCAAGGAGT
ACAAGTGCAAGGTCTCCAACAAAGGCCTCCCGTCCTCCATCGAGAAAACCATCTCCAAAGCCA
AAGGGCAGCCCCGAGAGCCACAGGTGTACACCCTGCCCCCATCCCAGGAGGAGATGACCAAG
AACCAGGTCAGCCTGACCTGCCTGGTCAAAGGCTTCTACCCCAGCGACATCGCCGTGGAGTGG
GAGAGCAATGGGCAGCCGGAGAACAACTACAAGACCACGCCTCCCGTGCTGGACTCCGACGG
CTCCTTCTTCCTCTACAGCAGGCTAACCGTGGACAAGAGCAGGTGGCAGGAGGGGAATGTCTT
CTCATGCTCCGTGATGCATGAGGCTCTGCACAACCACTACACACAGAAGAGCCTCTCCCTGTCT
CTGGGTAAAGCTAGCTGAT
Anti-DCIR_24A5.4A5_H-V-hIgG4H-C (SEQ ID NO: 91):
MDWLWNLLFLMAAAQSAQAQIQLVQSGPELKKPGETVKISCKASGYSFTNYGMNWVKQAPGKG
LKWMGWINTYTGESTYADDFKGRFAFSLETSASTAYLQISNLKNEDMATYFCARGDFRYYYFDY
WGQGTTLTGSSAKTKGPSVFPLAPCSRSTSESTAALGCLVKDYFPEPVTVSWNSGALTSGVHTFPA
VLQSSGLYSLSSVVTVPSSSLGTKTYTCNVDHKPSNTKVDKRVESKYGPPCPPCPAPEFEGGPSVFL
FPPKPKDTLMISRTPEVTCVVVDVSQEDPEVQFNWYVDGVEVHNAKTKPREEQFNSTYRVVSVLT
VLHQDWLNGKEYKCKVSNKGLPSSIEKTISKAKGQPREPQVYTLPPSQEEMTKNQVSLTCLVKGFY
PSDIAVEWESNGQPENNYKTTPPVLDSDGSFFLYSRLTVDKSRWQEGNVFSCSVMHEALHNHYTQ
KSLSLSLGKAS
Anti-DCIR_24A5.4A5_K-V-hIgGK-C (SEQ ID NO: 27):
ATGAGTGTGCTCACTCAGGTCCTGGCGTTGCTGCTGCTGTGGCTTACAGGTGCCAGATGTGACA
TCCAGATGACTCAGTCTCCAGCCTCCCTATCTGCATCTGTGGGAGAAACTGTCACCATCACGTG
TCGAGCAAGTGGGAATATTCACAATTATTTAGCATGGTATCAGCAGAAACAGGGAAAATCTCC
TCAGCTCCTGGTCTATAATGCAAAAACCTTGGCAGATGGTGTGCCATCAAGGTTCAGTGGCAG
TGGATCAGGAACACAATATTCTCTCAAGATCAACACCCTGCAGCCTGAAGATTTTGGGAGTTA
TTACTGTCAACATTTTTGGGATTCTTGGACGTTCGGTGGAGGCACCAAGCTCGAGATCAAACG
AACTGTGGCTGCACCATCTGTCTTCATCTTCCCGCCATCTGATGAGCAGTTGAAATCTGGAACT
GCCTCTGTTGTGTGCCTGCTGAATAACTTCTATCCCAGAGAGGCCAAAGTACAGTGGAAGGTG
GATAACGCCCTCCAATCGGGTAACTCCCAGGAGAGTGTCACAGAGCAGGACAGCAAGGACAG
CACCTACAGCCTCAGCAGCACCCTGACGCTGAGCAAAGCAGACTACGAGAAACACAAAGTCT
ATGCCTGCGAAGTCACCCATCAGGGCCTGAGCTCGCCCGTCACAAAGAGCTTCAACAGGGGAG
AGTGTTAG
Anti-DCIR_24A5.4A5_K-V-hIgGK-C (SEQ ID NO: 92):
MSVLTQVLALLLLWLTGARCDIQMTQSPASLSASVGETVTITCRASGNIHNYLAWYQQKQGKSPQ
LLVYNAKTLADGVPSRFSGSGSGTQYSLKINTLQPEDFGSYYCQHFWDSWTFGGGTKLEIKRTVAA
PSVFIFPPSDEQLKSGTASVVCLLNNFYPREAKVQWKVDNALQSGNSQESVTEQDSKDSTYSLSSTL
TLSKADYEKHKVYACEVTHQGLSSPVTKSFNRGEC
Anti-DCIR_24E7.3H9_H-V-hIgG4H-C (SEQ ID NO: 28):
ATGGAATGGACCTGGGTCTTTCTCTTCCTCCTGTCAGTAACTGCAGGTGTCCACTCCCAGGTTC
AGCTGCAGCAGTCTGGAGCTGAGCTGATGAAGCCTGGGGCCTCAGTGAAGATATCCTGCAAGG
CTACTGGCTACACATTCAGTAGCTACTGGATAGAGTGGGTAAAGCAGAGGCCTGGACATGGCC
TTGAGTGGATTGGAGAGATTTTACCTGGAAGTGGTAGGACTAACGACAATGAGAAGTTCAAGG
GCAAGGCCACATTCACTGCAGATACATCCTCCAAGAAAGCCTACATGCAACTCAGCAGCCTGA
CATCTGAGGACTCTGCCGTCTATTATTGTGCAAGAAGGGGTGGTTACTCCTTTGCTTACTGGGG
CCAAGGGACTCTGGTCACTGTCTCTGCAGCCAAAACAAAGGGCCCATCCGTCTTCCCCCTGGC
GCCCTGCTCCAGGAGCACCTCCGAGAGCACAGCCGCCCTGGGCTGCCTGGTCAAGGACTACTT
CCCCGAACCGGTGACGGTGTCGTGGAACTCAGGCGCCCTGACCAGCGGCGTGCACACCTTCCC
GGCTGTCCTACAGTCCTCAGGACTCTACTCCCTCAGCAGCGTGGTGACCGTGCCCTCCAGCAGC
TTGGGCACGAAGACCTACACCTGCAACGTAGATCACAAGCCCAGCAACACCAAGGTGGACAA
GAGAGTTGAGTCCAAATATGGTCCCCCATGCCCACCCTGCCCAGCACCTGAGTTCGAAGGGGG
ACCATCAGTCTTCCTGTTCCCCCCAAAACCCAAGGACACTCTCATGATCTCCCGGACCCCTGAG
GTCACGTGCGTGGTGGTGGACGTGAGCCAGGAAGACCCCGAGGTCCAGTTCAACTGGTACGTG
GATGGCGTGGAGGTGCATAATGCCAAGACAAAGCCGCGGGAGGAGCAGTTCAACAGCACGTA
CCGTGTGGTCAGCGTCCTCACCGTCCTGCACCAGGACTGGCTGAACGGCAAGGAGTACAAGTG
CAAGGTCTCCAACAAAGGCCTCCCGTCCTCCATCGAGAAAACCATCTCCAAAGCCAAAGGGCA
GCCCCGAGAGCCACAGGTGTACACCCTGCCCCCATCCCAGGAGGAGATGACCAAGAACCAGG
TCAGCCTGACCTGCCTGGTCAAAGGCTTCTACCCCAGCGACATCGCCGTGGAGTGGGAGAGCA
ATGGGCAGCCGGAGAACAACTACAAGACCACGCCTCCCGTGCTGGACTCCGACGGCTCCTTCT
TCCTCTACAGCAGGCTAACCGTGGACAAGAGCAGGTGGCAGGAGGGGAATGTCTTCTCATGCT
CCGTGATGCATGAGGCTCTGCACAACCACTACACACAGAAGAGCCTCTCCCTGTCTCTGGGTA
AAGCTAGCTGA
Anti-DCIR_24E7.3H9_H-V-hIgG4H-C (SEQ ID NO: 93):
MEWTWVFLFLLSVTAGVHSQVQLQQSGAELMKPGASVKISCKATGYTFSSYWIEWVKQRPGHGL
EWIGEILPGSGRTNDNEKFKGKATFTADTSSKKAYMQLSSLTSEDSAVYYCARRGGYSFAYWGQG
TLVTVSAAKTKGPSVFPLAPCSRSTSESTAALGCLVKDYFPEPVTVSWNSGALTSGVHTFPAVLQSS
GLYSLSSVVTVPSSSLGTKTYTCNVDHKPSNTKVDKRVESKYGPPCPPCPAPEFEGGPSVFLFPPKP
KDTLMISRTPEVTCVVVDVSQEDPEVQFNWYVDGVEVHNAKTKPREEQFNSTYRVVSVLTVLHQ
DWLNGKEYKCKVSNKGLPSSIEKTISKAKGQPREPQVYTLPPSQEEMTKNQVSLTCLVKGFYPSDI
AVEWESNGQPENNYKTTPPVLDSDGSFFLYSRLTVDKSRWQEGNVFSCSVMHEALHNHYTQKSLS
LSLGKAS
Anti-DCIR_24E7.3H9_K-V-hIgGK-C (SEQ ID NO: 29):
ATGACCATGTTCTCACTAGCTCTTCTCCTCAGTCTTCTTCTCCTCTGTGTCTCTGATTCTAGGGC
AGAAACAACTGTGACCCAGTCTATGACCATGTTCTCACTAGCTCTTCTCCTCAGTCTTCTTCTCC
TCTGTGTCTCTGATTCTAGGGCAGAAACAACTGTGACCCAGTCTCCAGCATCCCTGTCCATGGC
TATAGGGGAAAAAGTCACCATCAGATGCGTAACCAGCACTGATATTGATGATGATGTGAACTG
GTACCAGCAGAAGCCAGGGGAACCTCCTAAACTCCTTATTTCAGAAGGCAATACTCTTCGTCC
TGGAGTCCCATCCCGATTCTCCAGCAGTGGCTATGGTACAGATTTTGTTTTTACAATTGAGAAC
ATGCTCTCAGAAGATGTTGCAGATTACTACTGTTTGCAAAGTGGTAACTTGCCGTACACGTTCG
GAGGGGGGACCAAGCTCGAGATCAAACGAACTGTGGCTGCACCATCTGTCTTCATCTTCCCGC
CATCTGATGAGCAGTTGAAATCTGGAACTGCCTCTGTTGTGTGCCTGCTGAATAACTTCTATCC
CAGAGAGGCCAAAGTACAGTGGAAGGTGGATAACGCCCTCCAATCGGGTAACTCCCAGGAGA
GTGTCACAGAGCAGGACAGCAAGGACAGCACCTACAGCCTCAGCAGCACCCTGACGCTGAGC
AAAGCAGACTACGAGAAACACAAAGTCTATGCCTGCGAAGTCACCCATCAGGGCCTGAGCTC
GCCCGTCACAAAGAGCTTCAACAGGGGAGAGTGTTAGCCAGCATCCCTGTCCATGGCTATAGG
GGAAAAAGTCACCATCAGATGCGTAACCAGCACTGATATTGATGATGATGTGAACTGGTACCA
GCAGAAGCCAGGGGAACCTCCTAAACTCCTTATTTCAGAAGGCAATACTCTTCGTCCTGGAGT
CCCATCCCGATTCTCCAGCAGTGGCTATGGTACAGATTTTGTTTTTACAATTGAGAACATGCTC
TCAGAAGATGTTGCAGATTACTACTGTTTGCAAAGTGGTAACTTGCCGTACACGTTCGGAGGG
GGGACCAAGCTCGAGATCAAACGAACTGTGGCTGCACCATCTGTCTTCATCTTCCCGCCATCTG
ATGAGCAGTTGAAATCTGGAACTGCCTCTGTTGTGTGCCTGCTGAATAACTTCTATCCCAGAGA
GGCCAAAGTACAGTGGAAGGTGGATAACGCCCTCCAATCGGGTAACTCCCAGGAGAGTGTCA
CAGAGCAGGACAGCAAGGACAGCACCTACAGCCTCAGCAGCACCCTGACGCTGAGCAAAGCA
GACTACGAGAAACACAAAGTCTATGCCTGCGAAGTCACCCATCAGGGCCTGAGCTCGCCCGTC
ACAAAGAGCTTCAACAGGGGAGAGTGTTAG
Anti-DCIR_24E7.3H9_K-V-hIgGK-C (SEQ ID NO: 94):
MTMFSLALLLSLLLLCVSDSRAETTVTQSPASLSMAIGEKVTIRCVTSTDIDDDVNWYQQKPGEPPK
LLISEGNTLRPGVPSRFSSSGYGTDFVFTIENMLSEDVADYYCLQSGNLPYTFGGGTKLEIKRTVAA
PSVFIFPPSDEQLKSGTASVVCLLNNFYPREAKVQWKVDNALQSGNSQESVTEQDSKDSTYSLSSTL
TLSKADYEKHKVYACEVTHQGLSSPVTKSFNRGEC
Anti-DCIR_29E9.2E2_H-VhIgG4H-C (SEQ ID NO: 30):
ATGGCTTGGGTGTGGACCTTGCTATTCCTGATGGCAGCTGCCCAAAGTGCCCAAGCACAGATC
CAGTTGGTGCAGTCTGGACCTGAGCTGAAGAAGCCTGGAGAGACAGTCAAGATCTCCTGCAAG
GCTTCTGGGTATACCTTCACAAACTATGGAATGAACTGGGTGAAGCAGGCTCCAGGAAAGGGT
TTAAAGTGGGTGGGCTGGATAAACACCTTCACTGGAGAGCCAACATATGTTGATGACTTCAAG
GGACGGTTTGCCTTCTCTTTGGAAACCTCTGCCAGCACTGCCTATTTGCAGATCAACAACCTCA
AAAATGAGGACACGGCTACATATTTCTGTGCAAGAGGGAATTTTAGGTACTACTACTTTGACT
ACTGGGGCCAAGGCACCACTCTCACAGTCTCCTCAGCCAAAACAAAGGGCCCATCCGTCTTCC
CCCTGGCGCCCTGCTCCAGGAGCACCTCCGAGAGCACAGCCGCCCTGGGCTGCCTGGTCAAGG
ACTACTTCCCCGAACCGGTGACGGTGTCGTGGAACTCAGGCGCCCTGACCAGCGGCGTGCACA
CCTTCCCGGCTGTCCTACAGTCCTCAGGACTCTACTCCCTCAGCAGCGTGGTGACCGTGCCCTC
CAGCAGCTTGGGCACGAAGACCTACACCTGCAACGTAGATCACAAGCCCAGCAACACCAAGG
TGGACAAGAGAGTTGAGTCCAAATATGGTCCCCCATGCCCACCCTGCCCAGCACCTGAGTTCG
AAGGGGGACCATCAGTCTTCCTGTTCCCCCCAAAACCCAAGGACACTCTCATGATCTCCCGGA
CCCCTGAGGTCACGTGCGTGGTGGTGGACGTGAGCCAGGAAGACCCCGAGGTCCAGTTCAACT
GGTACGTGGATGGCGTGGAGGTGCATAATGCCAAGACAAAGCCGCGGGAGGAGCAGTTCAAC
AGCACGTACCGTGTGGTCAGCGTCCTCACCGTCCTGCACCAGGACTGGCTGAACGGCAAGGAG
TACAAGTGCAAGGTCTCCAACAAAGGCCTCCCGTCCTCCATCGAGAAAACCATCTCCAAAGCC
AAAGGGCAGCCCCGAGAGCCACAGGTGTACACCCTGCCCCCATCCCAGGAGGAGATGACCAA
GAACCAGGTCAGCCTGACCTGCCTGGTCAAAGGCTTCTACCCCAGCGACATCGCCGTGGAGTG
GGAGAGCAATGGGCAGCCGGAGAACAACTACAAGACCACGCCTCCCGTGCTGGACTCCGACG
GCTCCTTCTTCCTCTACAGCAGGCTAACCGTGGACAAGAGCAGGTGGCAGGAGGGGAATGTCT
TCTCATGCTCCGTGATGCATGAGGCTCTGCACAACCACTACACACAGAAGAGCCTCTCCCTGTC
TCTGGGTAAAGCTAGCTGA
Anti-DCIR_29E9.2E2_H-VhIgG4H-C (SEQ ID NO: 95):
MAWVWTLLFLMAAAQSAQAQIQLVQSGPELKKPGETVKISCKASGYTFTNYGMNWVKQAPGKG
LKWVGWINTFTGEPTYVDDFKGRFAFSLETSASTAYLQINNLKNEDTATYFCARGNFRYYYFDYW
GQGTTLTVSSAKTKGPSVFPLAPCSRSTSESTAALGCLVKDYFPEPVTVSWNSGALTSGVHTFPAVL
QSSGLYSLSSVVTVPSSSLGTKTYTCNVDHKPSNTKVDKRVESKYGPPCPPCPAPEFEGGPSVFLFPP
KPKDTLMISRTPEVTCVVVDVSQEDPEVQFNWYVDGVEVHNAKTKPREEQFNSTYRVVSVLTVLH
QDWLNGKEYKCKVSNKGLPSSIEKTISKAKGQPREPQVYTLPPSQEEMTKNQVSLTCLVKGFYPSD
IAVEWESNGQPENNYKTTPPVLDSDGSFFLYSRLTVDKSRWQEGNVFSCSVMHEALHNHYTQKSL
SLSLGKAS
Anti-DCIR_29E9.2E2_K-V-hIgGK-C (SEQ ID NO: 31):
ATGAGTGTGCTCACTCAGGTCCTGGCGTTGCTGCTGCTGTGGCTTACAGGTGCCAGATGTGACA
TCCAGATGACTCAGTCCCCAGCCTCCCTATCTGCATCTGTGGGAGAAACTGTCACCATCACATG
TCGAACAAGTGGGAATATTCGCAATTATTTAGCATGGTATCAGCAGAAACAGGGAAAATCTCC
TCAACTCCTGGTCTATAATGCAAAAACCTTAGCAGATGGTGTGCCATCAAGGTTCGGTGGCAG
TGGATCAGGAACACAATATTCTCTCAAGATCAACAGCCTGCAGCCTGAAGATTTTGGGAATTA
TTACTGTCAACATTTTTGGAGTAGTCCGTACACGTTCGGAGGGGGGACCAAGCTCGAGATCAA
ACGAACTGTGGCTGCACCATCTGTCTTCATCTTCCCGCCATCTGATGAGCAGTTGAAATCTGGA
ACTGCCTCTGTTGTGTGCCTGCTGAATAACTTCTATCCCAGAGAGGCCAAAGTACAGTGGAAG
GTGGATAACGCCCTCCAATCGGGTAACTCCCAGGAGAGTGTCACAGAGCAGGACAGCAAGGA
CAGCACCTACAGCCTCAGCAGCACCCTGACGCTGAGCAAAGCAGACTACGAGAAACACAAAG
TCTATGCCTGCGAAGTCACCCATCAGGGCCTGAGCTCGCCCGTCACAAAGAGCTTCAACAGGG
GAGAGTGTTAG
Anti-DCIR_29E9.2E2_K-V-hIgGK-C (SEQ ID NO: 96):
MSVLTQVLALLLLWLTGARCDIQMTQSPASLSASVGETVTITCRTSGNIRNYLAWYQQKQGKSPQ
LLVYNAKTLADGVPSRFGGSGSGTQYSLKINSLQPEDFGNYYCQHFWSSPYTFGGGTKLEIKRTVA
APSVFIFPPSDEQLKSGTASVVCLLNNFYPREAKVQWKVDNALQSGNSQESVTEQDSKDSTYSLSS
TLTLSKADYEKHKVYACEVTHQGLSSPVTKSFNRGEC
Anti-DCIR_29G10.3D9_H-V-hIgG4H-C (SEQ ID NO: 32):
ATGATGGGATGGAGCTATATCATCCTCTTTTTGGTAGCAACAGCTACAGATGTCCACTCCCAGG
TCCAACTGCAGCAGCCTGGGGCTGAACTGGTGAAGCCTGGGGCTTCAGTGAAGCTGTCCTGCA
AGGCTTCTGGCTACACCTTCACCAGCTACTGGATGCACTGGGTGAAGCAGAGGCCTGGAGAAG
GCCTTGAGTGGATTGGAGAGATTAATCCTAGCTACGGTCGTACTGACTACAATGAGAAGTTCA
AGAACAAGGCCACACTGACTGTAGCCAAATCCTCCAGCACAGCCTACATGCAACTCAGCAGCC
TGACATCTGAGGACTCTGCGGTCTATTACTGTGCAAGAGGAGATTACTACGGTAGTAGCTCGTT
TGCTTACTGGGGCCAAGGGACTCTGGTCACTGTCTCTGCAGCCAAAACAAAGGGCCCATCCGT
CTTCCCCCTGGCGCCCTGCTCCAGGAGCACCTCCGAGAGCACAGCCGCCCTGGGCTGCCTGGT
CAAGGACTACTTCCCCGAACCGGTGACGGTGTCGTGGAACTCAGGCGCCCTGACCAGCGGCGT
GCACACCTTCCCGGCTGTCCTACAGTCCTCAGGACTCTACTCCCTCAGCAGCGTGGTGACCGTG
CCCTCCAGCAGCTTGGGCACGAAGACCTACACCTGCAACGTAGATCACAAGCCCAGCAACACC
AAGGTGGACAAGAGAGTTGAGTCCAAATATGGTCCCCCATGCCCACCCTGCCCAGCACCTGAG
TTCGAAGGGGGACCATCAGTCTTCCTGTTCCCCCCAAAACCCAAGGACACTCTCATGATCTCCC
GGACCCCTGAGGTCACGTGCGTGGTGGTGGACGTGAGCCAGGAAGACCCCGAGGTCCAGTTCA
ACTGGTACGTGGATGGCGTGGAGGTGCATAATGCCAAGACAAAGCCGCGGGAGGAGCAGTTC
AACAGCACGTACCGTGTGGTCAGCGTCCTCACCGTCCTGCACCAGGACTGGCTGAACGGCAAG
GAGTACAAGTGCAAGGTCTCCAACAAAGGCCTCCCGTCCTCCATCGAGAAAACCATCTCCAAA
GCCAAAGGGCAGCCCCGAGAGCCACAGGTGTACACCCTGCCCCCATCCCAGGAGGAGATGAC
CAAGAACCAGGTCAGCCTGACCTGCCTGGTCAAAGGCTTCTACCCCAGCGACATCGCCGTGGA
GTGGGAGAGCAATGGGCAGCCGGAGAACAACTACAAGACCACGCCTCCCGTGCTGGACTCCG
ACGGCTCCTTCTTCCTCTACAGCAGGCTAACCGTGGACAAGAGCAGGTGGCAGGAGGGGAATG
TCTTCTCATGCTCCGTGATGCATGAGGCTCTGCACAACCACTACACACAGAAGAGCCTCTCCCT
GTCTCTGGGTAAAGCTAGCGGATGGAGCTATATCATCCTCTTTTTGGTAGCAACAGCTACAGAT
GTCCACTCCCAGGTCCAACTGCAGCAGCCTGGGGCTGAACTGGTGAAGCCTGGGGCTTCAGTG
AAGCTGTCCTGCAAGGCTTCTGGCTACACCTTCACCAGCTACTGGATGCACTGGGTGAAGCAG
AGGCCTGGAGAAGGCCTTGAGTGGATTGGAGAGATTAATCCTAGCTACGGTCGTACTGACTAC
AATGGGAAGTTCAAGAACAAGGCCACACTGACTGTAGCCAAATCCTCCAGCACAGCCTACATG
CAACTCAGCAGCCTGACATCTGAGGACTCTGCGGTCTATTACTGTGCAAGAGGAGATTACTAC
GGTAGTAGCTCGTTTGCTTACTGGGGCCAAGGGACTCTGGTCACTGTCTCTGCAGCCAAAACA
AAGGGCCCATCCGTCTTCCCCCTGGCGCCCTGCTCCAGGAGCACCTCCGAGAGCACAGCCGCC
CTGGGCTGCCTGGTCAAGGACTACTTCCCCGAACCGGTGACGGTGTCGTGGAACTCAGGCGCC
CTGACCAGCGGCGTGCACACCTTCCCGGCTGTCCTACAGTCCTCAGGACTCTACTCCCTCAGCA
GCGTGGTGACCGTGCCCTCCAGCAGCTTGGGCACGAAGACCTACACCTGCAACGTAGATCACA
AGCCCAGCAACACCAAGGTGGACAAGAGAGTTGAGTCCAAATATGGTCCCCCATGCCCACCCT
GCCCAGCACCTGAGTTCGAAGGGGGACCATCAGTCTTCCTGTTCCCCCCAAAACCCAAGGACA
CTCTCATGATCTCCCGGACCCCTGAGGTCACGTGCGTGGTGGTGGACGTGAGCCAGGAAGACC
CCGAGGTCCAGTTCAACTGGTACGTGGATGGCGTGGAGGTGCATAATGCCAAGACAAAGCCGC
GGGAGGAGCAGTTCAACAGCACGTACCGTGTGGTCAGCGTCCTCACCGTCCTGCACCAGGACT
GGCTGAACGGCAAGGAGTACAAGTGCAAGGTCTCCAACAAAGGCCTCCCGTCCTCCATCGAGA
AAACCATCTCCAAAGCCAAAGGGCAGCCCCGAGAGCCACAGGTGTACACCCTGCCCCCATCCC
AGGAGGAGATGACCAAGAACCAGGTCAGCCTGACCTGCCTGGTCAAAGGCTTCTACCCCAGCG
ACATCGCCGTGGAGTGGGAGAGCAATGGGCAGCCGGAGAACAACTACAAGACCACGCCTCCC
GTGCTGGACTCCGACGGCTCCTTCTTCCTCTACAGCAGGCTAACCGTGGACAAGAGCAGGTGG
CAGGAGGGGAATGTCTTCTCATGCTCCGTGATGCATGAGGCTCTGCACAACCACTACACACAG
AAGAGCCTCTCCCTGTCTCTGGGTAAAGCTAGCTGA
Anti-DCIR_29G10.3D9_H-V-hIgG4H-C (SEQ ID NO: 97):
MMGWSYIILFLVATATDVHSQVQLQQPGAELVKPGASVKLSCKASGYTFTSYWMHWVKQRPGEG
LEWIGEINPSYGRTDYNEKFKNKATLTVAKSSSTAYMQLSSLTSEDSAVYYCARGDYYGSSSFAY
WGQGTLVTVSAAKTKGPSVFPLAPCSRSTSESTAALGCLVKDYFPEPVTVSWNSGALTSGVHTFPA
VLQSSGLYSLSSVVTVPSSSLGTKTYTCNVDHKPSNTKVDKRVESKYGPPCPPCPAPEFEGGPSVFL
FPPKPKDTLMISRTPEVTCVVVDVSQEDPEVQFNWYVDGVEVHNAKTKPREEQFNSTYRVVSVLT
VLHQDWLNGKEYKCKVSNKGLPSSIEKTISKAKGQPREPQVYTLPPSQEEMTKNQVSLTCLVKGFY
PSDIAVEWESNGQPENNYKTTPPVLDSDGSFFLYSRLTVDKSRWQEGNVFSCSVMHEALHNHYTQ
KSLSLSLGKAS
Anti-DCIR_29G10.3D9_K-Var1-V-hIgGK-C (SEQ ID NO: 33):
ATGGATTTTCAAGTGCAGATTTTCAGCTTCCTGCTAATGAGTGCCTCAGTCATAATGTCCAGGG
GACAAATTGTTCTCACCCAGTCTCCAGCACTCATGTCTGCATCTCCAGGGGAGAAGGTCACCAT
GACCTGCAGTGCCAGCTCAAATATAAGTTACATGTACTGGTACCAGCAGAAGCCAAGATCCTC
CCCCAAACCCTGGATTTATCTCACATCCAACCTGGCTTCTGGAGTCCCTGCTCGCTTCAGTGGC
AGTGGGTCTGGGACCTCTTACTCTCTCACAACCAGCAGCATGGAGGCTGAAGATGCTGCCACT
TATTGCTGCCAGCAGTGGAGTAGTAACCCACCCACGTTCGGTGCTGGGACCAAGCTCGAGATC
AAACGAACTGTGGCTGCACCATCTGTCTTCATCTTCCCGCCATCTGATGAGCAGTTGAAATCTG
GAACTGCCTCTGTTGTGTGCCTGCTGAATAACTTCTATCCCAGAGAGGCCAAAGTACAGTGGA
AGGTGGATAACGCCCTCCAATCGGGTAACTCCCAGGAGAGTGTCACAGAGCAGGACAGCAAG
GACAGCACCTACAGCCTCAGCAGCACCCTGACGCTGAGCAAAGCAGACTACGAGAAACACAA
AGTCTATGCCTGCGAAGTCACCCATCAGGGCCTGAGCTCGCCCGTCACAAAGAGCTTCAACAG
GGGAGAGTGTTAG
Anti-DCIR_29G10.3D9_K-Var1-V-hIgGK-C (SEQ ID NO: 98):
MDFQVQIFSFLLMSASVIMSRGQIVLTQSPALMSASPGEKVTMTCSASSNISYMYWYQQKPRSSPK
PWIYLTSNLASGVPARFSGSGSGTSYSLTTSSMEAEDAATYCCQQWSSNPPTFGAGTKLEIKRTVA
APSVFIFPPSDEQLKSGTASVVCLLNNFYPREAKVQWKVDNALQSGNSQESVTEQDSKDSTYSLSS
TLTLSKADYEKHKVYACEVTHQGLSSPVTKSFNRGEC
Anti-DCIR_29G10.3D9_K-Var2-V-hIgGK-C (SEQ ID NO: 34):
ATGGATTTTCGAGTGCAGATTTTCAGCTTCCTGCTAATGAGTGCCTCAGTCATAATGTCCAGGG
GACAAATTGTTCTCACCCAGTCTCCAGCACTCATGTCTGCATCTCCAGGGGAGAAGGTCACCAT
GACCTGCAGTGCCAGCTCAAATATAAGTTACATGTACTGGTACCAGCAGAAGCCAAGATCCTC
CCCCAAACCCTGGATTTATCTCACATCCAACCTGGCTTCTGGAGTCCCTGCTCGCTTCAGTGGC
AGTGGGTCTGGGACCTCTTACTCTCTCACAATCAGCAGCATGGAGGCTGAAGATGCTGCCACT
TATTACTGCCAGCAGTGGAGTAGTAACCCACCCACGTTCGGTGCTGGGACCAAGCTCGAGATC
AAACGAACTGTGGCTGCACCATCTGTCTTCATCTTCCCGCCATCTGATGAGCAGTTGAAATCTG
GAACTGCCTCTGTTGTGTGCCTGCTGAATAACTTCTATCCCAGAGAGGCCAAAGTACAGTGGA
AGGTGGATAACGCCCTCCAATCGGGTAACTCCCAGGAGAGTGTCACAGAGCAGGACAGCAAG
GACAGCACCTACAGCCTCAGCAGCACCCTGACGCTGAGCAAAGCAGACTACGAGAAACACAA
AGTCTATGCCTGCGAAGTCACCCATCAGGGCCTGAGCTCGCCCGTCACAAAGAGCTTCAACAG
GGGAGAGTGTTAG
Anti-DCIR_29G10.3D9_K-Var2-V-hIgGK-C (SEQ ID NO: 99):
MDFRVQIFSFLLMSASVIMSRGQIVLTQSPALMSASPGEKVTMTCSASSNISYMYWYQQKPRSSPKP
WIYLTSNLASGVPARFSGSGSGTSYSLTISSMEAEDAATYYCQQWSSNPPTFGAGTKLEIKRTVAAP
SVFIFPPSDEQLKSGTASVVCLLNNFYPREAKVQWKVDNALQSGNSQESVTEQDSKDSTYSLSSTLT
LSKADYEKHKVYACEVTHQGLSSPVTKSFNRGEC
Anti-DCIR_2C9K-V-hIgGK-C (SEQ ID NO: 35):
ATGGAGACAGACACACTCCTGCTATGGGTGCTGCTGCTCTGGGTTCCAGGTTCCACAGGTGAC
ATTGTGCTGATCCAATCTCCAGCTTCTTTGGCTGTGTCTCTAGGGCAGAGGGCCACCATATCCT
GCAGAGCCAGTGAAAGTGTTGATAGTTATGTCAATAGTTTTATGCACTGGTACCAGCAGAAAC
CAGGACAGCCACCCAAACTCCTCATCTATCGTGTATCCAACCTAGAATCTGGGATCCCTGCCA
GGTTCAGTGGCAGTGGGTCTAGGACAGACTTCACCCTCACCATTAATCCTGTGGAGGCTGATG
ATGTTGCAACCTATTACTGTCAGCAAAGTAATGAGGATCCATTCACGTTCGGCTCGGGGACAA
AGCTCGAGATCAAACGAACTGTGGCTGCACCATCTGTCTTCATCTTCCCGCCATCTGATGAGCA
GTTGAAATCTGGAACTGCCTCTGTTGTGTGCCTGCTGAATAACTTCTATCCCAGAGAGGCCAAA
GTACAGTGGAAGGTGGATAACGCCCTCCAATCGGGTAACTCCCAGGAGAGTGTCACAGAGCA
GGACAGCAAGGACAGCACCTACAGCCTCAGCAGCACCCTGACGCTGAGCAAAGCAGACTACG
AGAAACACAAAGTCTATGCCTGCGAAGTCACCCATCAGGGCCTGAGCTCGCCCGTCACAAAGA
GCTTCAACAGGGGAGAGTGTTAG
Anti-DCIR_2C9K-V-hIgGK-C (SEQ ID NO: 100):
METDTLLLWVLLLWVPGSTGDIVLIQSPASLAVSLGQRATISCRASESVDSYVNSFMHWYQQKPG
QPPKLLIYRVSNLESGIPARFSGSGSRTDFTLTINPVEADDVATYYCQQSNEDPFTFGSGTKLEIKRT
VAAPSVFIFPPSDEQLKSGTASVVCLLNNFYPREAKVQWKVDNALQSGNSQESVTEQDSKDSTYSL
SSTLTLSKADYEKHKVYACEVTHQGLSSPVTKSFNRGEC.
Anti-DCIR_31A6.1F5_H-var2-V-hIgG4H-C (SEQ ID NO: 36):
ATGGAATGTAACTGGATACTTCCTTTTATTCTGTCGGTAATTTCAGGGGTCTACTCAGAGGTTC
AGCTCCAGCAGTCTGGGACTGTGCTGGCAAGGCCTGGGGCTTCCGTGAATATGTCCTGTAAGG
CTGCTGGCTACAGCTTTACCAGTTACTGGGTGTACTGGGTCAAACAGAGGCCTGGACAGGGTC
TGGAATGGATTGGTGCTATTTACCCTAAAAATAGTAGAACTAGCTACAACCAGAAGTTCCAGG
ACAAGGCCACACTGACTGCAGTCACATCCGCCAGCACTGCCTACATGGAGCTCAGCAGCCTGA
CAAATGAGGACTCTGCGGTCTATTACTGTACAAGACCTCACTATGATTCGTTTGGTTACTGGGG
CCAAGGGACTCTGGTCACTGTCTCTGCAGCCAAAACAaagggcccATCCGTCTTCCCCCTGGCGCC
CTGCTCCAGGAGCACCTCCGAGAGCACAGCCGCCCTGGGCTGCCTGGTCAAGGACTACTTCCC
CGAACCGGTGACGGTGTCGTGGAACTCAGGCGCCCTGACCAGCGGCGTGCACACCTTCCCGGC
TGTCCTACAGTCCTCAGGACTCTACTCCCTCAGCAGCGTGGTGACCGTGCCCTCCAGCAGCTTG
GGCACGAAGACCTACACCTGCAACGTAGATCACAAGCCCAGCAACACCAAGGTGGACAAGAG
AGTTGAGTCCAAATATGGTCCCCCATGCCCACCCTGCCCAGCACCTGAGTTCGAAGGGGGACC
ATCAGTCTTCCTGTTCCCCCCAAAACCCAAGGACACTCTCATGATCTCCCGGACCCCTGAGGTC
ACGTGCGTGGTGGTGGACGTGAGCCAGGAAGACCCCGAGGTCCAGTTCAACTGGTACGTGGAT
GGCGTGGAGGTGCATAATGCCAAGACAAAGCCGCGGGAGGAGCAGTTCAACAGCACGTACCG
TGTGGTCAGCGTCCTCACCGTCCTGCACCAGGACTGGCTGAACGGCAAGGAGTACAAGTGCAA
GGTCTCCAACAAAGGCCTCCCGTCCTCCATCGAGAAAACCATCTCCAAAGCCAAAGGGCAGCC
CCGAGAGCCACAGGTGTACACCCTGCCCCCATCCCAGGAGGAGATGACCAAGAACCAGGTCA
GCCTGACCTGCCTGGTCAAAGGCTTCTACCCCAGCGACATCGCCGTGGAGTGGGAGAGCAATG
GGCAGCCGGAGAACAACTACAAGACCACGCCTCCCGTGCTGGACTCCGACGGCTCCTTCTTCC
TCTACAGCAGGCTAACCGTGGACAAGAGCAGGTGGCAGGAGGGGAATGTCTTCTCATGCTCCG
TGATGCATGAGGCTCTGCACAACCACTACACACAGAAGAGCCTCTCCCTGTCTCTGGGTAAAG
CTAGCTGA
Anti-DCIR_31A6.1F5_H-var2-V-hIgG4H-C (SEQ ID NO: 101):
MECNWILPFILSVISGVYSEVQLQQSGTVLARPGASVNMSCKAAGYSFTSYWVYWVKQRPGQGLE
WIGAIYPKNSRTSYNQKFQDKATLTAVTSASTAYMELSSLTNEDSAVYYCTRPHYDSFGYWGQGT
LVTVSAAKTKGPSVFPLAPCSRSTSESTAALGCLVKDYFPEPVTVSWNSGALTSGVHTFPAVLQSSG
LYSLSSVVTVPSSSLGTKTYTCNVDHKPSNTKVDKRVESKYGPPCPPCPAPEFEGGPSVFLFPPKPK
DTLMISRTPEVTCVVVDVSQEDPEVQFNWYVDGVEVHNAKTKPREEQFNSTYRVVSVLTVLHQD
WLNGKEYKCKVSNKGLPSSIEKTISKAKGQPREPQVYTLPPSQEEMTKNQVSLTCLVKGFYPSDIA
VEWESNGQPENNYKTTPPVLDSDGSFFLYSRLTVDKSRWQEGNVFSCSVMHEALHNHYTQKSLSL
SLGKAS
Anti-DCIR_31A6.1F5_K-var2-V-hIgGK-C (SEQ ID NO: 37):
ATGGAGACAGACACACTCCTGCTATGGGTGCTGCTGCTCTGGGTTCCAGGTTCCACAGGTGAC
ATTGTGCTGACCCAATCTCCAGCTTCTTTGGCTGTGTCTCTAGGGCAGAGGGCCACCATATCCT
GCAGAGCCAGTGAAAGTGTAGATAGTTATGGCATTAGTTTTATGCACTGGTACCAGCAGAAAC
CAGGACAGCCACCCAAACTCCTCATCTATCGTGCATCCAACCAAGAATCTGGGATCCCTGCCA
GGTTCAGTGGCAGTGGGTCTAGGACAGACTTCACCCTCACCATTAATCCTGTGGAGGCTGATG
ATGTTGCAACCTATTACTGTCAGCAAAGTAATGAGGATCCGCTCACGTTCGGTGCTGGGACCA
AGCTCGAGATCAAACGAACTGTGGCTGCACCATCTGTCTTCATCTTCCCGCCATCTGATGAGCA
GTTGAAATCTGGAACTGCCTCTGTTGTGTGCCTGCTGAATAACTTCTATCCCAGAGAGGCCAAA
GTACAGTGGAAGGTGGATAACGCCCTCCAATCGGGTAACTCCCAGGAGAGTGTCACAGAGCA
GGACAGCAAGGACAGCACCTACAGCCTCAGCAGCACCCTGACGCTGAGCAAAGCAGACTACG
AGAAACACAAAGTCTATGCCTGCGAAGTCACCCATCAGGGCCTGAGCTCGCCCGTCACAAAGA
GCTTCAACAGGGGAGAGTGTTAG
Anti-DCIR_31A6.1F5_K-var2-V-hIgGK-C (SEQ ID NO: 102):
METDTLLLWVLLLWVPGSTGDIVLTQSPASLAVSLGQRATISCRASESVDSYGISFMHWYQQKPGQ
PPKLLIYRASNQESGIPARFSGSGSRTDFTLTINPVEADDVATYYCQQSNEDPLTFGAGTKLEIKRTV
AAPSVFIFPPSDEQLKSGTASVVCLLNNFYPREAKVQWKVDNALQSGNSQESVTEQDSKDSTYSLS
STLTLSKADYEKHKVYACEVTHQGLSSPVTKSFNRGEC
Anti-DCIR_3C2.2D9_H-LV-hIgG4H-C (SEQ ID NO: 38):
ATGAACAGGCTTACTTCCTCATTGCTGCTGCTGATTGTCCCTGCATATGTCCTGTCCCAGGTTAC
TCTGAAAGAGTCTGGCCCTGGGATATTGCAGCCCTCCCAGACCCTCAGTCTGACTTGTTCTTTC
TCTGGGTTTTCACTGAGCACTTCTGGTATGGGTGTGAGCTGGATTCGTCAGCCTTCAGGAAAGG
GTCTGGAGTGGCTGGCACACATTTACTGGGATGATGACAAGCGCTATAATCCATCCCTGAAGA
GCCGGCTCACAATCTTTAAGGATCCCTCCAGCAACCAGGTATTCCTCAGGATCACCAGTGTGG
ACACTGCAGATACTGCCACATACTACTGTGCTCGAAACTCCCATTACTACGGTAGTACTTACGG
GGGATACTTCGATGTCTGGGGCGCAGGGACCACGGTCACCGTCTCCTCAGCCAAAACAAAGGG
CCCATCCGTCTTCCCCCTGGCGCCCTGCTCCAGGAGCACCTCCGAGAGCACAGCCGCCCTGGG
CTGCCTGGTCAAGGACTACTTCCCCGAACCGGTGACGGTGTCGTGGAACTCAGGCGCCCTGAC
CAGCGGCGTGCACACCTTCCCGGCTGTCCTACAGTCCTCAGGACTCTACTCCCTCAGCAGCGTG
GTGACCGTGCCCTCCAGCAGCTTGGGCACGAAGACCTACACCTGCAACGTAGATCACAAGCCC
AGCAACACCAAGGTGGACAAGAGAGTTGAGTCCAAATATGGTCCCCCATGCCCACCCTGCCCA
GCACCTGAGTTCGAAGGGGGACCATCAGTCTTCCTGTTCCCCCCAAAACCCAAGGACACTCTC
ATGATCTCCCGGACCCCTGAGGTCACGTGCGTGGTGGTGGACGTGAGCCAGGAAGACCCCGAG
GTCCAGTTCAACTGGTACGTGGATGGCGTGGAGGTGCATAATGCCAAGACAAAGCCGCGGGA
GGAGCAGTTCAACAGCACGTACCGTGTGGTCAGCGTCCTCACCGTCCTGCACCAGGACTGGCT
GAACGGCAAGGAGTACAAGTGCAAGGTCTCCAACAAAGGCCTCCCGTCCTCCATCGAGAAAA
CCATCTCCAAAGCCAAAGGGCAGCCCCGAGAGCCACAGGTGTACACCCTGCCCCCATCCCAGG
AGGAGATGACCAAGAACCAGGTCAGCCTGACCTGCCTGGTCAAAGGCTTCTACCCCAGCGACA
TCGCCGTGGAGTGGGAGAGCAATGGGCAGCCGGAGAACAACTACAAGACCACGCCTCCCGTG
CTGGACTCCGACGGCTCCTTCTTCCTCTACAGCAGGCTAACCGTGGACAAGAGCAGGTGGCAG
GAGGGGAATGTCTTCTCATGCTCCGTGATGCATGAGGCTCTGCACAACCACTACACACAGAAG
AGCCTCTCCCTGTCTCTGGGTAAAGCTAGCTGA
Anti-DCIR_3C2.2D9_H-LV-hIgG4H-C (SEQ ID NO: 103):
NRLTSSLLLLIVPAYVLSQQVTLKESGPGILQPSQTLSLTCSFSGFSLSTSGMGVSWIRQPSGKGLEW
LAHIYWDDDKRYNPSLKSRLTIFKDPSSNQVFLRITSVDTADTATYYCARNSHYYGSTYGGYFDV
WGAGTTVTVSSAKTKGPSVFPLAPCSRSTSESTAALGCLVKDYFPEPVTVSWNSGALTSGVHTFPA
VLQSSGLYSLSSVVTVPSSSLGTKTYTCNVDHKPSNTKVDKRVESKYGPPCPPCPAPEFEGGPSVFL
FPPKPKDTLMISRTPEVTCVVVDVSQEDPEVQFNWYVDGVEVHNAKTKPREEQFNSTYRVVSVLT
VLHQDWLNGKEYKCKVSNKGLPSSIEKTISKAKGQPREPQVYTLPPSQEEMTKNQVSLTCLVKGFY
PSDIAVEWESNGQPENNYKTTPPVLDSDGSFFLYSRLTVDKSRWQEGNVFSCSVMHEALHNHYTQ
KSLSLSLGKAS.
Anti-DCIR_3C2.2D9_K-LV-hIgGK-C (SEQ ID NO: 39):
ATGGAGACAGACACACTCCTGCTATGGGTGCTGCTGCTCGGGGTTCCAGGTTCCACAGGTAAC
ATTGTGCTGACCCAGTCTCCAACTTCTTTCACTGTGTCTCTTGGGCAGAGGGCCACCATATCCT
GCAGAGCCAGTGAAAGTGTTCATAGTTATGGCAATAGTTTTATGCACTGGTACCAGCAGAAAC
CAGGGCAGCCACCCAAACTCCTCATCTATCTTGCATCCAACGTAGAATCTGGGGTCCCTGCCA
GGTTCAGTGGTAGTGGGTCCAGGACAGACTTCACCCTCACCATTGATCCTGTGGAGGCTGATG
ATGCTGCAACCTATTACTGTCAGCAAAATAGTGAGGATCCGTGGACGTTCGGTGGAGGCACCA
AGCTCGAGATCAAACGAACTGTGGCTGCACCATCTGTCTTCATCTTCCCGCCATCTGATGAGCA
GTTGAAATCTGGAACTGCCTCTGTTGTGTGCCTGCTGAATAACTTCTATCCCAGAGAGGCCAAA
GTACAGTGGAAGGTGGATAACGCCCTCCAATCGGGTAACTCCCAGGAGAGTGTCACAGAGCA
GGACAGCAAGGACAGCACCTACAGCCTCAGCAGCACCCTGACGCTGAGCAAAGCAGACTACG
AGAAACACAAAGTCTATGCCTGCGAAGTCACCCATCAGGGCCTGAGCTCGCCCGTCACAAAGA
GCTTCAACAGGGGAGAGTGTTAG
Anti-DCIR_3C2.2D9_K-LV-hIgGK-C (SEQ ID NO: 104):
METDTLLLWVLLLGVPGSTGNIVLTQSPTSFTVSLGQRATISCRASESVHSYGNSFMHWYQQKPGQ
PPKLLIYLASNVESGVPARFSGSGSRTDFTLTIDPVEADDAATYYCQQNSEDPWTFGGGTKLEIKRT
VAAPSVFIFPPSDEQLKSGTASVVCLLNNFYPREAKVQWKVDNALQSGNSQESVTEQDSKDSTYSL
SSTLTLSKADYEKHKVYACEVTHQGLSSPVTKSFNRGEC
Anti-DCIR_6C8.1G9_H-V-hIgG4H-C (SEQ ID NO: 40):
ATGGAATGGACCTGGGTCTTTCTCTTCCTCCTGTCAGTAACTGCAGGTGTCCACTCCCAGGTTC
AGCTGCAGCAGTCTGGAACTGAGCTGATGAAGCCTGGGGCCTCAGTGAAGATATCCTGCAAGG
CTACTGGCTACACATTCAGTACCTACTGGATAGAGTGGGTAAAGCAGAGGCCTGGACATGGCC
TTGAGTGGATTGGAGAGATTTTACCTGGAAGTGGTAGGACTAACGACAATGAGAAGTTCAAGG
GCAAGGCCACAATCACTGCAGATACATCCTCCAAGAAAGCCTACATGCAACTCAGCAGCCTGA
CATCTGAGGACTCTGCCGTCTATTACTGTGCAAGAAGGGGTGGTTACTCCTTTGCTTTCTGGGG
CCAAGGGACTCTGGTCTCTGTCTCTGCAGCCAAAACAAAGGGCCCATCCGTCTTCCCCCTGGCG
CCCTGCTCCAGGAGCACCTCCGAGAGCACAGCCGCCCTGGGCTGCCTGGTCAAGGACTACTTC
CCCGAACCGGTGACGGTGTCGTGGAACTCAGGCGCCCTGACCAGCGGCGTGCACACCTTCCCG
GCTGTCCTACAGTCCTCAGGACTCTACTCCCTCAGCAGCGTGGTGACCGTGCCCTCCAGCAGCT
TGGGCACGAAGACCTACACCTGCAACGTAGATCACAAGCCCAGCAACACCAAGGTGGACAAG
AGAGTTGAGTCCAAATATGGTCCCCCATGCCCACCCTGCCCAGCACCTGAGTTCGAAGGGGGA
CCATCAGTCTTCCTGTTCCCCCCAAAACCCAAGGACACTCTCATGATCTCCCGGACCCCTGAGG
TCACGTGCGTGGTGGTGGACGTGAGCCAGGAAGACCCCGAGGTCCAGTTCAACTGGTACGTGG
ATGGCGTGGAGGTGCATAATGCCAAGACAAAGCCGCGGGAGGAGCAGTTCAACAGCACGTAC
CGTGTGGTCAGCGTCCTCACCGTCCTGCACCAGGACTGGCTGAACGGCAAGGAGTACAAGTGC
AAGGTCTCCAACAAAGGCCTCCCGTCCTCCATCGAGAAAACCATCTCCAAAGCCAAAGGGCAG
CCCCGAGAGCCACAGGTGTACACCCTGCCCCCATCCCAGGAGGAGATGACCAAGAACCAGGT
CAGCCTGACCTGCCTGGTCAAAGGCTTCTACCCCAGCGACATCGCCGTGGAGTGGGAGAGCAA
TGGGCAGCCGGAGAACAACTACAAGACCACGCCTCCCGTGCTGGACTCCGACGGCTCCTTCTT
CCTCTACAGCAGGCTAACCGTGGACAAGAGCAGGTGGCAGGAGGGGAATGTCTTCTCATGCTC
CGTGATGCATGAGGCTCTGCACAACCACTACACACAGAAGAGCCTCTCCCTGTCTCTGGGTAA
AGCTAGCTGA
Anti-DCIR_6C8.1G9_H-V-hIgG4H-C (SEQ ID NO: 105):
MEWTWVFLFLLSVTAGVHSQVQLQQSGTELMKPGASVKISCKATGYTFSTYWIEWVKQRPGHGL
EWIGEILPGSGRTNDNEKFKGKATITADTSSKKAYMQLSSLTSEDSAVYYCARRGGYSFAFWGQGT
LVSVSAAKTKGPSVFPLAPCSRSTSESTAALGCLVKDYFPEPVTVSWNSGALTSGVHTFPAVLQSSG
LYSLSSVVTVPSSSLGTKTYTCNVDHKPSNTKVDKRVESKYGPPCPPCPAPEFEGGPSVFLFPPKPK
DTLMISRTPEVTCVVVDVSQEDPEVQFNWYVDGVEVHNAKTKPREEQFNSTYRVVSVLTVLHQD
WLNGKEYKCKVSNKGLPSSIEKTISKAKGQPREPQVYTLPPSQEEMTKNQVSLTCLVKGFYPSDIA
VEWESNGQPENNYKTTPPVLDSDGSFFLYSRLTVDKSRWQEGNVFSCSVMHEALHNHYTQKSLSL
SLGKAS
Anti-DCIR_6C8.1G9_K-V-hIgGK-C (SEQ ID NO: 41):
ATGACCATGTTCTCACTAGCTCTTCTCCTCAGTCTTCTTCTCCTCTGTGTCTCTGATTCTAGGGC
AGAAACAACTGTGACCCAGTCTCCAGCATCCCTGTCCATGGCTATAGGAGAAAAAGTCACCAT
CAGATGCGTAACCAGCACTGATATTGATGATGATGTGAACTGGTACCAGCAGAAGCCAGGGG
AACCTCCTAAGCTCCTTATTTCAGAAGGCAATACTCTTCGTGCTGGAGTCCCATCCCGATTCTC
CAGCAGTGGCTATGGTACAGATTTTGTTTTTACAATTGAGAACATGCTCTCAGAAGATGTTGCA
GATTACTACTGTTTGCAAAGTGGTAACTTGCCGTACACGTTCGGAGGGGGGACCAAGCTCGAG
ATCAAACGAACTGTGGCTGCACCATCTGTCTTCATCTTCCCGCCATCTGATGAGCAGTTGAAAT
CTGGAACTGCCTCTGTTGTGTGCCTGCTGAATAACTTCTATCCCAGAGAGGCCAAAGTACAGTG
GAAGGTGGATAACGCCCTCCAATCGGGTAACTCCCAGGAGAGTGTCACAGAGCAGGACAGCA
AGGACAGCACCTACAGCCTCAGCAGCACCCTGACGCTGAGCAAAGCAGACTACGAGAAACAC
AAAGTCTATGCCTGCGAAGTCACCCATCAGGGCCTGAGCTCGCCCGTCACAAAGAGCTTCAAC
AGGGGAGAGTGTTAG
Anti-DCIR_6C8.1G9_K-V-hIgGK-C (SEQ ID NO: 106):
MTMFSLALLLSLLLLCVSDSRAETTVTQSPASLSMAIGEKVTIRCVTSTDIDDDVNWYQQKPGEPPK
LLISEGNTLRAGVPSRFSSSGYGTDFVFTIENMLSEDVADYYCLQSGNLPYTFGGGTKLEIKRTVAA
PSVFIFPPSDEQLKSGTASVVCLLNNFYPREAKVQWKVDNALQSGNSQESVTEQDSKDSTYSLSSTL
TLSKADYEKHKVYACEVTHQGLSSPVTKSFNRGEC
Anti-DCIR_9E8.1E3_H-V-hIgG4H-C (SEQ ID NO: 42):
ATGAACAGGCTTACTTCCTCATTGCTGCTGCTGATTGTCCCTGCATATGTCCTGTCCCAGGTTAC
TCTGAAAGAGTCTGGCCCTGGGATATTGCAGCCCTCCCAGACCCTCAGTCTGACTTGTTCTTTC
TCTGGGTTTTCACTGAGCACTTCTGGTATGGGTCTGAGCTGGATTCGTCAGCCTTCAGGAAAGG
GTCTGGAGTGGCTGGCACACATTTACTGGGATGATGACAAGCGCTATAACCCATCCCTGAAGA
GCCGGCTCACAATCTCCAAGGATACCTCCAGCAACCAGGTTTTCCTCAAGATCACCATTGTGG
ACACTGCAGATGCTGCCACATACTACTGTGCTCGAAGCTCCCATTACTACGGTTATGGCTACGG
GGGATACTTCGATGTCTGGGGCGCAGGGACCACGGTCACCGTCTCCTCAGCCAAAACGAAGGG
CCCATCCGTCTTCCCCCTGGCGCCCTGCTCCAGGAGCACCTCCGAGAGCACAGCCGCCCTGGG
CTGCCTGGTCAAGGACTACTTCCCCGAACCGGTGACGGTGTCGTGGAACTCAGGCGCCCTGAC
CAGCGGCGTGCACACCTTCCCGGCTGTCCTACAGTCCTCAGGACTCTACTCCCTCAGCAGCGTG
GTGACCGTGCCCTCCAGCAGCTTGGGCACGAAGACCTACACCTGCAACGTAGATCACAAGCCC
AGCAACACCAAGGTGGACAAGAGAGTTGAGTCCAAATATGGTCCCCCATGCCCACCCTGCCCA
GCACCTGAGTTCGAAGGGGGACCATCAGTCTTCCTGTTCCCCCCAAAACCCAAGGACACTCTC
ATGATCTCCCGGACCCCTGAGGTCACGTGCGTGGTGGTGGACGTGAGCCAGGAAGACCCCGAG
GTCCAGTTCAACTGGTACGTGGATGGCGTGGAGGTGCATAATGCCAAGACAAAGCCGCGGGA
GGAGCAGTTCAACAGCACGTACCGTGTGGTCAGCGTCCTCACCGTCCTGCACCAGGACTGGCT
GAACGGCAAGGAGTACAAGTGCAAGGTCTCCAACAAAGGCCTCCCGTCCTCCATCGAGAAAA
CCATCTCCAAAGCCAAAGGGCAGCCCCGAGAGCCACAGGTGTACACCCTGCCCCCATCCCAGG
AGGAGATGACCAAGAACCAGGTCAGCCTGACCTGCCTGGTCAAAGGCTTCTACCCCAGCGACA
TCGCCGTGGAGTGGGAGAGCAATGGGCAGCCGGAGAACAACTACAAGACCACGCCTCCCGTG
CTGGACTCCGACGGCTCCTTCTTCCTCTACAGCAGGCTAACCGTGGACAAGAGCAGGTGGCAG
GAGGGGAATGTCTTCTCATGCTCCGTGATGCATGAGGCTCTGCACAACCACTACACACAGAAG
AGCCTCTCCCTGTCTCTGGGTAAAGCTAGCTGA
Anti-DCIR_9E8.1E3_H-V-hIgG4H-C (SEQ ID NO: 107):
MNRLTSSLLLLIVPAYVLSQVTLKESGPGILQPSQTLSLTCSFSGFSLSTSGMGLSWIRQPSGKGLEW
LAHIYWDDDKRYNPSLKSRLTISKDTSSNQVFLKITIVDTADAATYYCARSSHYYGYGYGGYFDV
WGAGTTVTVSSAKTKGPSVFPLAPCSRSTSESTAALGCLVKDYFPEPVTVSWNSGALTSGVHTFPA
VLQSSGLYSLSSVVTVPSSSLGTKTYTCNVDHKPSNTKVDKRVESKYGPPCPPCPAPEFEGGPSVFL
FPPKPKDTLMISRTPEVTCVVVDVSQEDPEVQFNWYVDGVEVHNAKTKPREEQFNSTYRVVSVLT
VLHQDWLNGKEYKCKVSNKGLPSSIEKTISKAKGQPREPQVYTLPPSQEEMTKNQVSLTCLVKGFY
PSDIAVEWESNGQPENNYKTTPPVLDSDGSFFLYSRLTVDKSRWQEGNVFSCSVMHEALHNHYTQ
KSLSLSLGKAS
Anti-DCIR_9E8.1E3_K-LV-hIgGK-C (SEQ ID NO: 43):
ATGGAGACAGACACACTCCTGCTATGGGTGCTGCTGCTCTGGGTTCCAGGTTCCACAGGTAAC
ATTGTGCTGACCCAATCTCCAGCTTCTTTGGCTGTGTCTCTAGGGCAGAGGGCCACCATATCCT
GCAGAGCCAGTGAAAGTATTCATAGTTATGGCAATAGTTTTCTGCACTGGTACCAGCAGAAAC
CAGGACAGCCACCCAAACTCCTCATCTATCTTGCATCCAACCTAGAATCTGGGGTCCCTGCCAG
GTTCAGCGGCAGTGGGTCTAGGACAGACTTCACCCTCACCATTGATCCTGTGGAGGCTGATGA
TGCTGCAACCTATTACTGTCAGCAAAATAATGAGGATCCGTGGACGTTCGGTGGAGGCACCAA
GCTCGAGATCAAACGAACTGTGGCTGCACCATCTGTCTTCATCTTCCCGCCATCTGATGAGCAG
TTGAAATCTGGAACTGCCTCTGTTGTGTGCCTGCTGAATAACTTCTATCCCAGAGAGGCCAAAG
TACAGTGGAAGGTGGATAACGCCCTCCAATCGGGTAACTCCCAGGAGAGTGTCACAGAGCAG
GACAGCAAGGACAGCACCTACAGCCTCAGCAGCACCCTGACGCTGAGCAAAGCAGACTACGA
GAAACACAAAGTCTATGCCTGCGAAGTCACCCATCAGGGCCTGAGCTCGCCCGTCACAAAGAG
CTTCAACAGGGGAGAGTGTTAGGCGGCCGCACTAGCGCGGGCCGCATTCGAAGAGCTCGGTAC
CCGGGGATCCTCTAGAGTCGACCTGCAGGCATGCAAGCTGGCCGCGACTCTAGATCATAATCA
GC
Anti-DCIR_9E8.1E3_K-LV-hIgGK-C (SEQ ID NO: 108):
METDTLLLWVLLLWVPGSTGNIVLTQSPASLAVSLGQRATISCRASESIHSYGNSFLHWYQQKPGQ
PPKLLIYLASNLESGVPARFSGSGSRTDFTLTIDPVEADDAATYYCQQNNEDPWTFGGGTKLEIKRT
VAAPSVFIFPPSDEQLKSGTASVVCLLNNFYPREAKVQWKVDNALQSGNSQESVTEQDSKDSTYSL
SSTLTLSKADYEKHKVYACEVTHQGLSSPVTKSFNRGEC
Anti-DCIR2C9H-LV-hIgG4H-V-hIgG4H-C (SEQ ID NO: 44):
ATGAAATGCAGCTGGGTCATCTTCTTCCTGATGGCAGTGGTTACAGGGGTCAATTCAGAGGTTC
AGCTGCAGCAGTCTGGGGCTGAGCTTGTGAGGCCAGGGGCCTTAGTCAAGTTGTCCTGCAAAG
CTTCTGGCTTCAACATTAATGACTACTATATCCACTGGGTGAAGCAGCGGCCTGAACAGGGCC
TGGAGCGGATTGGATGGATTGATCCTGACAATGGTAATACTATATATGACCCGAAGTTCCAGG
GCAAGGCCAGTATAACAGCAGACACATCCCCCAACACAGCCTACCTGCAGCTCAGCAGCCTGA
CATCTGAGGACACTGCCGTCTATTACTGTGCTAGAACCCGATCTCCTATGGTTACGACGGGGTT
TGTTTACTGGGGCCAAGGGACTGTGGTCACTGTCTCTGCAGCCAAAACGAAGGGCCCATCCGT
CTTCCCCCTGGCGCCCTGCTCCAGGAGCACCTCCGAGAGCACAGCCGCCCTGGGCTGCCTGGT
CAAGGACTACTTCCCCGAACCGGTGACGGTGTCGTGGAACTCAGGCGCCCTGACCAGCGGCGT
GCACACCTTCCCGGCTGTCCTACAGTCCTCAGGACTCTACTCCCTCAGCAGCGTGGTGACCGTG
CCCTCCAGCAGCTTGGGCACGAAGACCTACACCTGCAACGTAGATCACAAGCCCAGCAACACC
AAGGTGGACAAGAGAGTTGAGTCCAAATATGGTCCCCCATGCCCACCCTGCCCAGCACCTGAG
TTCGAAGGGGGACCATCAGTCTTCCTGTTCCCCCCAAAACCCAAGGACACTCTCATGATCTCCC
GGACCCCTGAGGTCACGTGCGTGGTGGTGGACGTGAGCCAGGAAGACCCCGAGGTCCAGTTCA
ACTGGTACGTGGATGGCGTGGAGGTGCATAATGCCAAGACRAAGCCGCGGGAGGAGCAGTTC
AACAGCACGTACCGTGTGGTCAGCGTCCTCACCGTCCTGCACCAGGACTGGCTGAACGGCAAG
GAGTACAAGTGCAAGGTCTCCAACAAAGGCCTCCCGTCCTCCATCGAGAAAACCATCTCCAAA
GCCAAAGGGCAGCCCCGAGAGCCACAGGTGTACACCCTGCCCCCATCCCAGGAGGAGATGAC
CAAGAACCAGGTCAGCCTGACCTGCCTGGTCAAAGGCTTCTACCCCAGCGACATCGCCGTGGA
GTGGGAGAGCAATGGGCAGCCGGAGAACAACTACAAGACCACGCCTCCCGTGCTGGACTCCG
ACGGCTCCTTCTTCCTCTACAGCAGGCTAACCGTGGACAAGAGCAGGTGGCAGGAGGGGAATG
TCTTCTCATGCTCCGTGATGCATGAGGCTCTGCACAACCACTACACACAGAAGAGCCTCTCCCT
GTCTCTGGGTAAATGA
Anti-DCIR2C9H-LV-hIgG4H-V-hIgG4H-C (SEQ ID NO: 109):
MKCSWVIFFLMAVVTGVNSEVQLQQSGAELVRPGALVKLSCKASGFNINDYYIHWVKQRPEQGLE
RIGWIDPDNGNTIYDPKFQGKASITADTSPNTAYLQLSSLTSEDTAVYYCARTRSPMVTTGFVYWG
QGTVVTVSAAKTKGPSVFPLAPCSRSTSESTAALGCLVKDYFPEPVTVSWNSGALTSGVHTFPAVL
QSSGLYSLSSVVTVPSSSLGTKTYTCNVDHKPSNTKVDKRVESKYGPPCPPCPAPEFEGGPSVFLFPP
KPKDTLMISRTPEVTCVVVDVSQEDPEVQFNWYVDGVEVHNAKXKPREEQFNSTYRVVSVLTVL
HQDWLNGKEYKCKVSNKGLPSSIEKTISKAKGQPREPQVYTLPPSQEEMTKNQVSLTCLVKGFYPS
DIAVEWESNGQPENNYKTTPPVLDSDGSFFLYSRLTVDKSRWQEGNVFSCSVMHEALHNHYTQKS
LSLSLGK
Anti-DC-SIGNL16E3H (SEQ ID NO: 45):
ATGGAAAGGCACTGGATCTTTCTCTTCCTGTTTTCAGTAACTGCAGGTGTCCACTCCCAGGTCC
AGCTTCAGCAGTCTGGGGCTGAGCTGGCAAAACCTGGGGCCTCAGTGAAGATGTCCTGCAAGG
CTTCTGGCTACACCTTTACTACCTACTGGATGCACTGGGTAAAACAGAGGCCTGGACAGGGTC
TGGAATGGATTGGATACATTAATCCTATCACTGGTTATACTGAGTACAATCAGAAGTTCAAGG
ACAAGGCCACCTTGACTGCAGACAAATCCTCCAGCACAGCCTACATGCAACTGAGCAGCCTGA
CATCTGAGGACTCTGCAGTCTATTACTGTGCAAGAGAGGGTTTAAGTGCTATGGACTATTGGG
GTCAGGGAACCTCAGTCACCGTCACCTCAGCCAAAACAACAGCCCCATCGGTCTATCCACTGG
CCCCTGTGTGTGGAGATACAACTGGCTCCTCGGTAACTCTAGGATGCCTGGTCAAGGGTTATTT
CCCTGAGCCAGTGACCTTGACCTGGAACTCTGGATCCCTGTCCAGTGGTGTGCACACCTTCCCA
GCTGTCCTGCAGTCTGACCTCTACACCCTCAGCAGCTCAGTGACTGTAACCTCGAGCACCTGGC
CCAGCCAGACCGTCACCTGCAGCGTTGCTCACCCAGCCAGCAGCACCACGGTGGACAAAAAAC
TTGAGCCCAGCGGGCCCATTTCAACAATCAACCCCTGTCCTCCATGCAAGGAGTGTCACAAAT
GCCCAGCTCCTAACCTCGAGGGTGGACCATCCGTCTTCATCTTCCCTCCAAATATCAAGGATGT
ACTCATGATCTCCCTGACACCCAAGGTCACGTGTGTGGTGGTGGATGTGAGCGAGGATGACCC
AGACGTCCAGATCAGCTGGTTTGTGAACAACGTGGAAGTACACACAGCTCAGACACAAACCCA
TAGAGAGGATTACAACAGTACTATCCGGGTGGTCAGCACCCTCCCCATCCAGCACCAGGACTG
GATGAGTGGCAAGGAGTTCAAATGCAAGGTCAACAACAAAGACCTCCCATCACCCATCGAGA
GAACCATCTCAAAAATTAAAGGGCTAGTCAGAGCTCCACAAGTATACATCTTGCCGCCACCAG
CAGAGCAGTTGTCCAGGAAAGATGTCAGTCTCACTTGCCTGGTCGTGGGCTTCAACCCTGGAG
ACATCAGTGTGGAGTGGACCAGCAATGGGCATACAGAGGAGAACTACAAGGACACCGCACCA
GTCCTGGACTCTGACGGTTCTTACTTCATATATAGCAAGCTCAATATGAAAACAAGCAAGTGG
GAGAAAACAGATTCCTTCTCATGCAACGTGAGACACGAGGGTCTGAAAAATTACTACCTGAAG
AAGACCATCTCCCGGTCTCCGGGTAAAGCTAGCTGA
Anti-DC-SIGNL16E3H (SEQ ID NO: 110):
MERHWIFLFLFSVTAGVHSQVQLQQSGAELAKPGASVKMSCKASGYTFTTYWMHWVKQRPGQG
LEWIGYINPITGYTEYNQKFKDKATLTADKSSSTAYMQLSSLTSEDSAVYYCAREGLSAMDYWGQ
GTSVTVTSAKTTAPSVYPLAPVCGDTTGSSVTLGCLVKGYFPEPVTLTWNSGSLSSGVHTFPAVLQ
SDLYTLSSSVTVTSSTWPSQTVTCSVAHPASSTTVDKKLEPSGPISTINPCPPCKECHKCPAPNLEGG
PSVFIFPPNIKDVLMISLTPKVTCVVVDVSEDDPDVQISWFVNNVEVHTAQTQTHREDYNSTIRVVS
TLPIQHQDWMSGKEFKCKVNNKDLPSPIERTISKIKGLVRAPQVYILPPPAEQLSRKDVSLTCLVVG
FNPGDISVEWTSNGHTEENYKDTAPVLDSDGSYFIYSKLNMKTSKWEKTDSFSCNVRHEGLKNYY
LKKTISRSPGKAS
Anti-DC-SIGNL16E3K (SEQ ID NO: 46):
ATGGGCATCAAGATGGAGTCACGGATTCAGGCATTTGTATTCGTGTTTCTCTGGTTGTCTGGTG
TTGGCGGAGACATTGTGATGACCCAGTCTCACAAATTCATGTCCACATCAGTAGGAGACAGGG
TCAGCGTCACCTGCAAGGCCAGTCAGGATGTGACTTCTGCTGTAGCCTGGTATCAACAAAAAC
CAGGGCAATCTCCTAAACTACTGATTTACTGGGCATCCACCCGGCACACTGGAGTCCCTGATC
GCTTCACAGGCAGTGGATCTGGGACAGATTATACTCTCACCATCAGCAGTGGGCAGGCTGAAG
ACCTGGCACTTTATTACTGTCACCAATATTATAGCGCTCCTCGGACGTTCGGTGGAGGCACCAA
GCTGGAAGTCAAACGGGCTGATGCTGCACCAACTGTATCCATCTTCCCACCATCCAGTGAGCA
GTTAACATCTGGAGGTGCCTCAGTCGTGTGCTTCTTGAACAACTTCTACCCCAAAGACATCAAT
GTCAAGTGGAAGATTGATGGCAGTGAACGACAAAATGGCGTCCTGAACAGTTGGACTGATCA
GGACAGCAAAGACAGCACCTACAGCATGAGCAGCACCCTCACGTTGACCAAGGACGAGTATG
AACGACATAACAGCTATACCTGTGAGGCCACTCACAAGACATCAACTTCACCCATCGTCAAGA
GCTTCAATAGGAATGAGTGTTAG
Anti-DC-SIGNL16E3K (SEQ ID NO: 111):
MESRIQAFVFVFLWLSGVGGDIVMTQSHKFMSTSVGDRVSVTCKASQDVTSAVAWYQQKPGQSP
KLLIYWASTRHTGVPDRFTGSGSGTDYTLTISSGQAEDLALYYCHQYYSAPRTFGGGTKLEVKRAD
AAPTVSIFPPSSEQLTSGGASVVCFLNNFYPKDINVKWKIDGSERQNGVLNSWTDQDSKDSTYSMS
STLTLTKDEYERHNSYTCEATHKTSTSPIVKSFNRNEC
Anti-DC-SIGNL16E7H-LV-hIgG4H-C (SEQ ID NO: 47):
ATGGAAAGGCACTGGATCTTTCTCTTCCTGTTTTCAGTAACTGCAGGTGTCCACTCCCAGGTCC
AGCTTCAGCAGTCTGGGGCTGAGCTGGCAAAACCTGGGGCCTCAGTGAAGATGTCCTGCAAGG
CTTCTGGCTACACCTTTACTACCTACTGGATGCACTGGGTAAAACAGAGGCCTGGACAGGGTC
TGGAATGGATTGGATACATTAATCCTATCACTGGTTATACTGAGTACAATCAGAAGTTCAAGG
ACAAGGCCACCTTGACTGCAGACAAATCCTCCAGCACAGCCTACATGCAACTGAGCAGCCTGA
CATCTGAGGACTCTGCAGTCTATTACTGTGCAAGAGAGGGTTTAAGTGCTATGGACTATTGGG
GTCAGGGAACCTCAGTCACCGTCACCTCAGCCAAAACAACGGGCCCATCCGTCTTCCCCCTGG
CGCCCTGCTCCAGGAGCACCTCCGAGAGCACAGCCGCCCTGGGCTGCCTGGTCAAGGACTACT
TCCCCGAACCGGTGACGGTGTCGTGGAACTCAGGCGCCCTGACCAGCGGCGTGCACACCTTCC
CGGCTGTCCTACAGTCCTCAGGACTCTACTCCCTCAGCAGCGTGGTGACCGTGCCCTCCAGCAG
CTTGGGCACGAAGACCTACACCTGCAACGTAGATCACAAGCCCAGCAACACCAAGGTGGACA
AGAGAGTTGAGTCCAAATATGGTCCCCCATGCCCACCCTGCCCAGCACCTGAGTTCGAAGGGG
GACCATCAGTCTTCCTGTTCCCCCCAAAACCCAAGGACACTCTCATGATCTCCCGGACCCCTGA
GGTCACGTGCGTGGTGGTGGACGTGAGCCAGGAAGACCCCGAGGTCCAGTTCAACTGGTACGT
GGATGGCGTGGAGGTGCATAATGCCAAGACAAAGCCGCGGGAGGAGCAGTTCAACAGCACGT
ACCGTGTGGTCAGCGTCCTCACCGTCCTGCACCAGGACTGGCTGAACGGCAAGGAGTACAAGT
GCAAGGTCTCCAACAAAGGCCTCCCGTCCTCCATCGAGAAAACCATCTCCAAAGCCAAAGGGC
AGCCCCGAGAGCCACAGGTGTACACCCTGCCCCCATCCCAGGAGGAGATGACCAAGAACCAG
GTCAGCCTGACCTGCCTGGTCAAAGGCTTCTACCCCAGCGACATCGCCGTGGAGTGGGAGAGC
AATGGGCAGCCGGAGAACAACTACAAGACCACGCCTCCCGTGCTGGACTCCGACGGCTCCTTC
TTCCTCTACAGCAGGCTAACCGTGGACAAGAGCAGGTGGCAGGAGGGGAATGTCTTCTCATGC
TCCGTGATGCATGAGGCTCTGCACAACCACTACACACAGAAGAGCCTCTCCCTGTCTCTGGGT
AAAGCTAGCTGA
Anti-DC-SIGNL16E7H-LV-hIgG4H-C (SEQ ID NO: 112):
MERHWIFLFLFSVTAGVHSQVQLQQSGAELAKPGASVKMSCKASGYTFTTYWMHWVKQRPGQG
LEWIGYINPITGYTEYNQKFKDKATLTADKSSSTAYMQLSSLTSEDSAVYYCAREGLSAMDYWGQ
GTSVTVTSAKTTGPSVFPLAPCSRSTSESTAALGCLVKDYFPEPVTVSWNSGALTSGVHTFPAVLQS
SGLYSLSSVVTVPSSSLGTKTYTCNVDHKPSNTKVDKRVESKYGPPCPPCPAPEFEGGPSVFLFPPKP
KDTLMISRTPEVTCVVVDVSQEDPEVQFNWYVDGVEVHNAKTKPREEQFNSTYRVVSVLTVLHQ
DWLNGKEYKCKVSNKGLPSSIEKTISKAKGQPREPQVYTLPPSQEEMTKNQVSLTCLVKGFYPSDI
AVEWESNGQPENNYKTTPPVLDSDGSFFLYSRLTVDKSRWQEGNVFSCSVMHEALHNHYTQKSLS
LSLGKAS.
Anti-DC-SIGNL16E7K-LV-hIgGK-C (SEQ ID NO: 48):
ATGGGCATCAAGATGGAGTCACAGATTCAGGCATTTGTATTCGTGTTTCTCTGGTTGTCTGGTG
TTGGCGGAGACATTGTGATGACCCAGTCTCACAAATTCATGTCCACATCAGTAGGAGACAGGG
TCAGCGTCACCTGCAAGGCCAGTCAGGATGTGACTTCTGCTGTAGCCTGGTATCAACAAAAAC
CAGGGCAATCTCCTAAACTACTGATTTACTGGGCATCCACCCGGCACACTGGAGTCCCTGATC
GCTTCACAGGCAGTGGATCTGGGACAGATTATACTCTCACCATCAGCAGTGGGCAGGCTGAAG
ACCTGGCACTTTATTACTGTCACCAATATTATAGCGCTCCTCGGACGTTCGGTGGAGGCACCAA
GCTCGAGATCAAACGAACTGTGGCTGCACCATCTGTCTTCATCTTCCCGCCATCTGATGAGCAG
TTGAAATCTGGAACTGCCTCTGTTGTGTGCCTGCTGAATAACTTCTATCCCAGAGAGGCCAAAG
TACAGTGGAAGGTGGATAACGCCCTCCAATCGGGTAACTCCCAGGAGAGTGTCACAGAGCAG
GACAGCAAGGACAGCACCTACAGCCTCAGCAGCACCCTGACGCTGAGCAAAGCAGACTACGA
GAAACACAAAGTCTATGCCTGCGAAGTCACCCATCAGGGCCTGAGCTCGCCCGTCACAAAGAG
CTTCAACAGGGGAGAGTGTTAG
Anti-DC-SIGNL16E7K-LV-hIgGK-C (SEQ ID NO: 113):
MESQIQAFVFVFLWLSGVGGDIVMTQSHKFMSTSVGDRVSVTCKASQDVTSAVAWYQQKPGQSP
KLLIYWASTRHTGVPDRFTGSGSGTDYTLTISSGQAEDLALYYCHQYYSAPRTFGGGTKLEIKRTV
AAPSVFIFPPSDEQLKSGTASVVCLLNNFYPREAKVQWKVDNALQSGNSQESVTEQDSKDSTYSLS
STLTLSKADYEKHKVYACEVTHQGLSSPVTKSFNRGEC
Anti-Dectin_1_11B6.4_H-V-hIgG4H-C (SEQ ID NO: 49):
ATGGCTGTCCTGGCACTACTCCTCTGCCTGGTGGCTTTCCCAACTTGTACCCTGTCCCAGGTGC
AACTGAAGGAGTCAGGACCTGGCCTGGTGGCGCCCTCACAGAGCCTGTCCATTACCTGCTCTG
TCTCTGGGTTCTCATTAAGCAACTATGATATAAGCTGGATTCGCCAGCCACCAGGAAAGGGTC
TGGAGTGGCTTGGAGTAATGTGGACTGGTGGAGGCGCAAATTATAATTCAGCTTTCATGTCCA
GACTGAGCATCAACAAGGACAACTCCAAGAGCCAAGTTTTTTTAAAAATGAACAATCTGCAAA
CTGATGACACAGCCATTTATTACTGTGTCAGAGATGCGGTGAGGTACTGGAACTTCGATGTCTG
GGGCGCAGGGACCACGGTCACCGTCTCCTCAGCCAAAACGAAGGGCCCATCCGTCTTCCCCCT
GGCGCCCTGCTCCAGGAGCACCTCCGAGAGCACAGCCGCCCTGGGCTGCCTGGTCAAGGACTA
CTTCCCCGAACCGGTGACGGTGTCGTGGAACTCAGGCGCCCTGACCAGCGGCGTGCACACCTT
CCCGGCTGTCCTACAGTCCTCAGGACTCTACTCCCTCAGCAGCGTGGTGACCGTGCCCTCCAGC
AGCTTGGGCACGAAGACCTACACCTGCAACGTAGATCACAAGCCCAGCAACACCAAGGTGGA
CAAGAGAGTTGAGTCCAAATATGGTCCCCCATGCCCACCCTGCCCAGCACCTGAGTTCGAAGG
GGGACCATCAGTCTTCCTGTTCCCCCCAAAACCCAAGGACACTCTCATGATCTCCCGGACCCCT
GAGGTCACGTGCGTGGTGGTGGACGTGAGCCAGGAAGACCCCGAGGTCCAGTTCAACTGGTAC
GTGGATGGCGTGGAGGTGCATAATGCCAAGACAAAGCCGCGGGAGGAGCAGTTCAACAGCAC
GTACCGTGTGGTCAGCGTCCTCACCGTCCTGCACCAGGACTGGCTGAACGGCAAGGAGTACAA
GTGCAAGGTCTCCAACAAAGGCCTCCCGTCCTCCATCGAGAAAACCATCTCCAAAGCCAAAGG
GCAGCCCCGAGAGCCACAGGTGTACACCCTGCCCCCATCCCAGGAGGAGATGACCAAGAACC
AGGTCAGCCTGACCTGCCTGGTCAAAGGCTTCTACCCCAGCGACATCGCCGTGGAGTGGGAGA
GCAATGGGCAGCCGGAGAACAACTACAAGACCACGCCTCCCGTGCTGGACTCCGACGGCTCCT
TCTTCCTCTACAGCAGGCTAACCGTGGACAAGAGCAGGTGGCAGGAGGGGAATGTCTTCTCAT
GCTCCGTGATGCATGAGGCTCTGCACAACCACTACACACAGAAGAGCCTCTCCCTGTCTCTGG
GTAAAGCTAGCTGA
Anti-Dectin_1_11B6.4_H-V-hIgG4H-C (SEQ ID NO: 114):
MAVLALLLCLVAFPTCTLSQVQLKESGPGLVAPSQSLSITCSVSGFSLSNYDISWIRQPPGKGLEWL
GVMWTGGGANYNSAFMSRLSINKDNSKSQVFLKMNNLQTDDTAIYYCVRDAVRYWNFDVWGA
GTTVTVSSAKTKGPSVFPLAPCSRSTSESTAALGCLVKDYFPEPVTVSWNSGALTSGVHTFPAVLQS
SGLYSLSSVVTVPSSSLGTKTYTCNVDHKPSNTKVDKRVESKYGPPCPPCPAPEFEGGPSVFLFPPKP
KDTLMISRTPEVTCVVVDVSQEDPEVQFNWYVDGVEVHNAKTKPREEQFNSTYRVVSVLTVLHQ
DWLNGKEYKCKVSNKGLPSSIEKTISKAKGQPREPQVYTLPPSQEEMTKNQVSLTCLVKGFYPSDI
AVEWESNGQPENNYKTTPPVLDSDGSFFLYSRLTVDKSRWQEGNVFSCSVMHEALHNHYTQKSLS
LSLGKAS
Anti-Dectin_1_11B6.4_K-LV-hIgGK-C (SEQ ID NO: 50):
ATGGATTTTCAAGCGCAGATTTTCAGCTTCCTGCTAATCAGTGCTTCAGTCATAATGTCCAGAG
GACAAATTGTTCTCTCCCAGTCACCAGCAATCCTGTCTGCATCTCCAGGGGAGAAGGTCACAA
TGACTTGCAGGGCCAGCTCAAGTGTAAGTTACATACACTGGTACCAGCAGAAGCCAGGATCCT
CCCCCAAACCCTGGATTTATGCCACATCCCACCTGGCTTCTGGAGTCCCTGCTCGCTTCAGTGG
CAGTGGGTCTGGGACCTCTTACTCTCTCACAATCAGCAGAGTGGAGGCTGAAGATACTGCCAC
TTATTACTGCCAGCAGTGGAGTAGTAACCCATTCACGTTCGGCTCGGGGACAAAGCTCGAGAT
CAAACGAACTGTGGCTGCACCATCTGTCTTCATCTTCCCGCCATCTGATGAGCAGTTGAAATCT
GGAACTGCCTCTGTTGTGTGCCTGCTGAATAACTTCTATCCCAGAGAGGCCAAAGTACAGTGG
AAGGTGGATAACGCCCTCCAATCGGGTAACTCCCAGGAGAGTGTCACAGAGCAGGACAGCAA
GGACAGCACCTACAGCCTCAGCAGCACCCTGACGCTGAGCAAAGCAGACTACGAGAAACACA
AAGTCTATGCCTGCGAAGTCACCCATCAGGGCCTGAGCTCGCCCGTCACAAAGAGCTTCAACA
GGGGAGAGTGTTAG
Anti-Dectin_1_11B6.4_K-LV-hIgGK-C (SEQ ID NO: 115):
MDFQAQIFSFLLISASVIMSRGQIVLSQSPAILSASPGEKVTMTCRASSSVSYIHWYQQKPGSSPKPWI
YATSHLASGVPARFSGSGSGTSYSLTISRVEAEDTATYYCQQWSSNPFTFGSGTKLEIKRTVAAPSV
FIFPPSDEQLKSGTASVVCLLNNFYPREAKVQWKVDNALQSGNSQESVTEQDSKDSTYSLSSTLTLS
KADYEKHKVYACEVTHQGLSSPVTKSFNRGEC
Anti-Dectin_1_15E2.5_H-V-hIgG4H-C (SEQ ID NO: 51):
ATGGAAAGGCACTGGATCTTTCTACTCCTGTTGTCAGTAACTGCAGGTGTCCACTCCCAGGTCC
AGCTGCAGCAGTCTGGGGCTGAACTGGCAAGACCTGGGGCCTCAGTGAAGATGTCCTGCAAGG
CTTCTGGCTACACCTTTACTACCTACACTATGCACTGGGTAAAACAGAGGCCTGGACAGGGTCT
GGAATGGATTGGATACATTAATCCTAGCAGTGGTTATACTAATTACAATCAGAAGTTCAAGGA
CAAGGCCACATTGACTGCAGACAAATCCTCCAGCACAGCCTCCATGCAACTGAGCAGCCTGAC
ATCTGAGGACTCTGCAGTCTATTACTGTGCAAGAGAGAGGGCGGTATTAGTCCCCTATGCTAT
GGACTACTGGGGTCAAGGAACCTCAGTCACCGTCTCCTCAGCCAAAACAAAGGGCCCATCCGT
CTTCCCCCTGGCGCCCTGCTCCAGGAGCACCTCCGAGAGCACAGCCGCCCTGGGCTGCCTGGT
CAAGGACTACTTCCCCGAACCGGTGACGGTGTCGTGGAACTCAGGCGCCCTGACCAGCGGCGT
GCACACCTTCCCGGCTGTCCTACAGTCCTCAGGACTCTACTCCCTCAGCAGCGTGGTGACCGTG
CCCTCCAGCAGCTTGGGCACGAAGACCTACACCTGCAACGTAGATCACAAGCCCAGCAACACC
AAGGTGGACAAGAGAGTTGAGTCCAAATATGGTCCCCCATGCCCACCCTGCCCAGCACCTGAG
TTCGAAGGGGGACCATCAGTCTTCCTGTTCCCCCCAAAACCCAAGGACACTCTCATGATCTCCC
GGACCCCTGAGGTCACGTGCGTGGTGGTGGACGTGAGCCAGGAAGACCCCGAGGTCCAGTTCA
ACTGGTACGTGGATGGCGTGGAGGTGCATAATGCCAAGACAAAGCCGCGGGAGGAGCAGTTC
AACAGCACGTACCGTGTGGTCAGCGTCCTCACCGTCCTGCACCAGGACTGGCTGAACGGCAAG
GAGTACAAGTGCAAGGTCTCCAACAAAGGCCTCCCGTCCTCCATCGAGAAAACCATCTCCAAA
GCCAAAGGGCAGCCCCGAGAGCCACAGGTGTACACCCTGCCCCCATCCCAGGAGGAGATGAC
CAAGAACCAGGTCAGCCTGACCTGCCTGGTCAAAGGCTTCTACCCCAGCGACATCGCCGTGGA
GTGGGAGAGCAATGGGCAGCCGGAGAACAACTACAAGACCACGCCTCCCGTGCTGGACTCCG
ACGGCTCCTTCTTCCTCTACAGCAGGCTAACCGTGGACAAGAGCAGGTGGCAGGAGGGGAATG
TCTTCTCATGCTCCGTGATGCATGAGGCTCTGCACAACCACTACACACAGAAGAGCCTCTCCCT
GTCTCTGGGTAAAGCTAGCTGA
Anti-Dectin_1_15E2.5_H-V-hIgG4H-C (SEQ ID NO: 116):
MERHWIFLLLLSVTAGVHSQVQLQQSGAELARPGASVKMSCKASGYTFTTYTMHWVKQRPGQGL
EWIGYINPSSGYTNYNQKFKDKATLTADKSSSTASMQLSSLTSEDSAVYYCARERAVLVPYAMDY
WGQGTSVTVSSAKTKGPSVFPLAPCSRSTSESTAALGCLVKDYFPEPVTVSWNSGALTSGVHTFPA
VLQSSGLYSLSSVVTVPSSSLGTKTYTCNVDHKPSNTKVDKRVESKYGPPCPPCPAPEFEGGPSVFL
FPPKPKDTLMISRTPEVTCVVVDVSQEDPEVQFNWYVDGVEVHNAKTKPREEQFNSTYRVVSVLT
VLHQDWLNGKEYKCKVSNKGLPSSIEKTISKAKGQPREPQVYTLPPSQEEMTKNQVSLTCLVKGFY
PSDIAVEWESNGQPENNYKTTPPVLDSDGSFFLYSRLTVDKSRWQEGNVFSCSVMHEALHNHYTQ
KSLSLSLGKAS
Anti-Dectin_1_15E2.5_K-V-hIgGK-C (SEQ ID NO: 52):
ATGCATTTTCAAGTGCAGATTTTCAGCTTCCTGCTAATCAGTGCCTCAGTCATAATGTCCAGAG
GACAAATTGTTCTCACCCAGTCTCCAGCAGTCATGTCTGCATCTCCAGGGGAGAAGGTCACCA
TAACCTGCACTGCCAGCTCAAGTTTAAGTTACATGCACTGGTTCCAGCAGAAGCCAGGCACTT
CTCCCAAACTCTGGCTTTATAGCACATCCATCCTGGCTTCTGGAGTCCCTACTCGCTTCAGTGG
CAGTGGATCTGGGACCTCTTACTCTCTCACAATCAGCCGAATGGAGGCTGAAGATGCTGCCAC
TTATTACTGCCAGCAAAGGAGTAGTTCCCCATTCACGTTCGGCTCGGGGACAAAGCTCGAGAT
CAAACGAACTGTGGCTGCACCATCTGTCTTCATCTTCCCGCCATCTGATGAGCAGTTGAAATCT
GGAACTGCCTCTGTTGTGTGCCTGCTGAATAACTTCTATCCCAGAGAGGCCAAAGTACAGTGG
AAGGTGGATAACGCCCTCCAATCGGGTAACTCCCAGGAGAGTGTCACAGAGCAGGACAGCAA
GGACAGCACCTACAGCCTCAGCAGCACCCTGACGCTGAGCAAAGCAGACTACGAGAAACACA
AAGTCTATGCCTGCGAAGTCACCCATCAGGGCCTGAGCTCGCCCGTCACAAAGAGCTTTCAACA
GGGGAGAGTGTTAG
Anti-Dectin_1_15E2.5_K-V-hIgGK-C (SEQ ID NO: 117):
MHFQVQIFSFLLISASVIMSRGQIVLTQSPAVMSASPGEKVTITCTASSSLSYMHWFQQKPGTSPKL
WLYSTSILASGVPTRFSGSGSGTSYSLTISRMEAEDAATYYCQQRSSSPFTFGSGTKLEIKRTVAAPS
VFIFPPSDEQLKSGTASVVCLLNNFYPREAKVQWKVDNALQSGNSQESVTEQDSKDSTYSLSSTLT
LSKADYEKHKVYACEVTHQGLSSPVTKSFNRGEC
Anti-Dectin_1_2D8.2D4H-V-hIgG4H-C (SEQ ID NO: 53):
ATGGGATGGACCTGGATCTTTATTTTAATCCTGTCAGTTACTACAGGTGTCCACTCTGAGGTCC
AGCTGCAGCAGTCTGGACCTGAGCTGGAGAAGCCTGGCGCTTCAGTGAAGATATCCTGCAAGG
CTTCTGGTTACTCCTTCACTGGCTACAACATGAACTGGGTGAAACAGAGCAATGGAAAGAGCC
TTGAGTGGATTGGAAATATTGATCCTTACTATGGTGATACTAACTACAACCAGAAGTTCAAGG
GCAAGGCCACATTGACTGTAGACAAATCCTCCAGCACAGCCTACATGCACCTCAAGAGCCTGA
CATCTGAGGACTCTGCAGTCTATTACTGTGCAAGACCCTACGGTAGTGAGGCCTACTTTGCTTA
CTGGGGCCAAGGGACTCTGGTCACTGTCTCTGCAGCCAAAACGAAGGGCCCATCCGTCTTCCC
CCTGGCGCCCTGCTCCAGGAGCACCTCCGAGAGCACAGCCGCCCTGGGCTGCCTGGTCAAGGA
CTACTTCCCCGAACCGGTGACGGTGTCGTGGAACTCAGGCGCCCTGACCAGCGGCGTGCACAC
CTTCCCGGCTGTCCTACAGTCCTCAGGACTCTACTCCCTCAGCAGCGTGGTGACCGTGCCCTCC
AGCAGCTTGGGCACGAAGACCTACACCTGCAACGTAGATCACAAGCCCAGCAACACCAAGGT
GGACAAGAGAGTTGAGTCCAAATATGGTCCCCCATGCCCACCCTGCCCAGCACCTGAGTTCGA
AGGGGGACCATCAGTCTTCCTGTTCCCCCCAAAACCCAAGGACACTCTCATGATCTCCCGGAC
CCCTGAGGTCACGTGCGTGGTGGTGGACGTGAGCCAGGAAGACCCCGAGGTCCAGTTCAACTG
GTACGTGGATGGCGTGGAGGTGCATAATGCCAAGACAAAGCCGCGGGAGGAGCAGTTCAACA
GCACGTACCGTGTGGTCAGCGTCCTCACCGTCCTGCACCAGGACTGGCTGAACGGCAAGGAGT
ACAAGTGCAAGGTCTCCAACAAAGGCCTCCCGTCCTCCATCGAGAAAACCATCTCCAAAGCCA
AAGGGCAGCCCCGAGAGCCACAGGTGTACACCCTGCCCCCATCCCAGGAGGAGATGACCAAG
AACCAGGTCAGCCTGACCTGCCTGGTCAAAGGCTTCTACCCCAGCGACATCGCCGTGGAGTGG
GAGAGCAATGGGCAGCCGGAGAACAACTACAAGACCACGCCTCCCGTGCTGGACTCCGACGG
CTCCTTCTTCCTCTACAGCAGGCTAACCGTGGACAAGAGCAGGTGGCAGGAGGGGAATGTCTT
CTCATGCTCCGTGATGCATGAGGCTCTGCACAACCACTACACACAGAAGAGCCTCTCCCTGTCT
CTGGGTAAAGCTAGCTGA
Anti-Dectin_1_2D8.2D4H-V-hIgG4H-C (SEQ ID NO: 118):
MGWTWIFILILSVTTGVHSEVQLQQSGPELEKPGASVKISCKASGYSFTGYNMNWVKQSNGKSLE
WIGNIDPYYGDTNYNQKFKGKATLTVDKSSSTAYMHLKSLTSEDSAVYYCARPYGSEAYFAYWG
QGTLVTVSAAKTKGPSVFPLAPCSRSTSESTAALGCLVKDYFPEPVTVSWNSGALTSGVHTFPAVL
QSSGLYSLSSVVTVPSSSLGTKTYTCNVDHKPSNTKVDKRVESKYGPPCPPCPAPEFEGGPSVFLFPP
KPKDTLMISRTPEVTCVVVDVSQEDPEVQFNWYVDGVEVHNAKTKPREEQFNSTYRVVSVLTVLH
QDWLNGKEYKCKVSNKGLPSSIEKTISKAKGQPREPQVYTLPPSQEEMTKNQVSLTCLVKGFYPSD
IAVEWESNGQPENNYKTTPPVLDSDGSFFLYSRLTVDKSRWQEGNVFSCSVMHEALHNHYTQKSL
SLSLGKAS
Anti-Dectin_1_2D8.2D4K-V-hIgGK-C (SEQ ID NO: 54):
ATGGTGTCCACTTCTCAGCTCCTTGGACTTTTGCTTTTCTGGACTTCAGCCTCCAGATGTGACAT
TGTGATGACTCAGTCTCCAGCCACCCTGTCTGTGACTCCAGGAGATAGAGTCTCTCTTTCCTGC
AGGGCCAGCCAGAGTATTAGCGACTACTTACACTGGTATCAACAAAAATCACATGAGTCTCCA
AGGCTTCTCATCAAATATGCTGCCCAATCCATCTCTGGGATCCCCTCCAGGTTCAGTGGCAGTG
GATCAGGGTCAGATTTCACTCTCAGTATCAACGGTGTGGAACCTGAAGATGTTGGAGTGTATT
ACTGTCAAAATGGTCACAGCTTTCCGTACACGTTCGGAGGGGGGACCAAGCTCGAGATCAAAC
GAACTGTGGCTGCACCATCTGTCTTCATCTTCCCGCCATCTGATGAGCAGTTGAAATCTGGAAC
TGCCTCTGTTGTGTGCCTGCTGAATAACTTCTATCCCAGAGAGGCCAAAGTACAGTGGAAGGT
GGATAACGCCCTCCAATCGGGTAACTCCCAGGAGAGTGTCACAGAGCAGGACAGCAAGGACA
GCACCTACAGCCTCAGCAGCACCCTGACGCTGAGCAAAGCAGACTACGAGAAACACAAAGTC
TATGCCTGCGAAGTCACCCATCAGGGCCTGAGCTCGCCCGTCACAAAGAGCTTCAACAGGGGA
GAGTGTTAG
Anti-Dectin_1_2D8.2D4K-V-hIgGK-C (SEQ ID NO: 119):
DIVMTQSPATLSVTPGDRVSLSCRASQSISDYLHWYQQKSHESPRLLIKYAAQSISGIPSRFSGSGSG
SDFTLSINGVEPEDVGVYYCQNGHSFPYTFGGGTKLEIKRTVAAPSVFIFPPSDEQLKSGTASVVCLL
NNFYPREAKVQWKVDNALQSGNSQESVTEQDSKDSTYSLSSTLTLSKADYEKHKVYACEVTHQG
LSSPVTKSFNRGEC
Anti-Langerin15B10H-LV-hIgG4H-C (SEQ ID NO: 55):
ATGGAATGGAGGATCTTTCTCTTCATCCTGTCAGGAACTGCAGGTGTCCACTCCCAGGTTCAGC
TGCGGCAGTCTGGACCTGAGCTGGTGAAGCCTGGGGCTTCAGTGAAGATGTCCTGCAAGGCTT
CTGGATACACATTTACTGACTATGTTATAAGTTGGGTGAAGCAGAGAACTGGACAGGGCCTTG
AGTGGATTGGAGATATTTATCCTGGAAGTGGTTATTCTTTCTACAATGAGAACTTCAAGGGCAA
GGCCACACTGACTGCAGACAAATCCTCCACCACAGCCTACATGCAGCTCAGCAGCCTGACATC
TGAGGACTCTGCGGTCTATTTCTGTGCAACCTACTATAACTACCCTTTTGCTTACTGGGGCCAA
GGGACTCTGGTCACTGTCTCTGCAGCCAAAACAACGGGCCCATCCGTCTTCCCCCTGGCGCCCT
GCTCCAGGAGCACCTCCGAGAGCACAGCCGCCCTGGGCTGCCTGGTCAAGGACTACTTCCCCG
AACCGGTGACGGTGTCGTGGAACTCAGGCGCCCTGACCAGCGGCGTGCACACCTTCCCGGCTG
TCCTACAGTCCTCAGGACTCTACTCCCTCAGCAGCGTGGTGACCGTGCCCTCCAGCAGCTTGGG
CACGAAGACCTACACCTGCAACGTAGATCACAAGCCCAGCAACACCAAGGTGGACAAGAGAG
TTGAGTCCAAATATGGTCCCCCATGCCCACCCTGCCCAGCACCTGAGTTCGAAGGGGGACCAT
CAGTCTTCCTGTTCCCCCCAAAACCCAAGGACACTCTCATGATCTCCCGGACCCCTGAGGTCAC
GTGCGTGGTGGTGGACGTGAGCCAGGAAGACCCCGAGGTCCAGTTCAACTGGTACGTGGATGG
CGTGGAGGTGCATAATGCCAAGACAAAGCCGCGGGAGGAGCAGTTCAACAGCACGTACCGTG
TGGTCAGCGTCCTCACCGTCCTGCACCAGGACTGGCTGAACGGCAAGGAGTACAAGTGCAAGG
TCTCCAACAAAGGCCTCCCGTCCTCCATCGAGAAAACCATCTCCAAAGCCAAAGGGCAGCCCC
GAGAGCCACAGGTGTACACCCTGCCCCCATCCCAGGAGGAGATGACCAAGAACCAGGTCAGC
CTGACCTGCCTGGTCAAAGGCTTCTACCCCAGCGACATCGCCGTGGAGTGGGAGAGCAATGGG
CAGCCGGAGAACAACTACAAGACCACGCCTCCCGTGCTGGACTCCGACGGCTCCTTCTTCCTCT
ACAGCAGGCTAACCGTGGACAAGAGCAGGTGGCAGGAGGGGAATGTCTTCTCATGCTCCGTG
ATGCATGAGGCTCTGCACAACCACTACACACAGAAGAGCCTCTCCCTGTCTCTGGGTAAAGCT
AGCTGA
Anti-Langerin15B10H-LV-hIgG4H-C (SEQ ID NO: 120):
QVQLRQSGPELVKPGASVKMSCKASGYTFTDYVISWVKQRTGQGLEWIGDIYPGSGYSFYNENFK
GKATLTADKSSTTAYMQLSSLTSEDSAVYFCATYYNYPFAYWGQGTLVTVSAAKTTGPSVFPLAP
CSRSTSESTAALGCLVKDYFPEPVTVSWNSGALTSGVHTFPAVLQSSGLYSLSSVVTVPSSSLGTKT
YTCNVDHKPSNTKVDKRVESKYGPPCPPCPAPEFEGGPSVFLFPPKPKDTLMISRTPEVTCVVVDVS
QEDPEVQFNWYVDGVEVHNAKTKPREEQFNSTYRVVSVLTVLHQDWLNGKEYKCKVSNKGLPSS
IEKTISKAKGQPREPQVYTLPPSQEEMTKNQVSLTCLVKGFYPSDIAVEWESNGQPENNYKTTPPVL
DSDGSFFLYSRLTVDKSRWQEGNVFSCSVMHEALHNHYTQKSLSLSLGKAS.
Anti-Langerin15B10K-LV-hIgGK-C (SEQ ID NO: 56):
ATGAAGTTGCCTGTTAGGCTGTTGGTGCTGATGTTCTGGATTCCTGCTTCCAGCAGTGATGTTG
TGATGACCCAAACTCCACTCTCCCTGCCTGTCCGTCTTGGAGATCAAGCCTCCATCTCTTGCAG
ATCTAGTCAGAGCCTTGTACACAGTAATGGAAACACCTATTTACATTGGTACCTGCAGAAGCC
AGGCCAGTCTCCAAAGCTCCTGATCTACAAAGTTTCCAACCGATTTTCTGGGGTCCCAGACAG
GTTCAGTGGCAGTGGATCAGGGACAAATTTCACACTCAAGATCAGCAGAGTGGAGGCTGAGG
ATCTGGGACTTTATTTCTGCTCTCAAAGTACACATGTTCCGTACACGTTCGGAGGGGGGACCAA
GCTCGAGATCAAACGAACTGTGGCTGCACCATCTGTCTTCATCTTCCCGCCATCTGATGAGCAG
TTGAAATCTGGAACTGCCTCTGTTGTGTGCCTGCTGAATAACTTCTATCCCAGAGAGGCCAAAG
TACAGTGGAAGGTGGATAACGCCCTCCAATCGGGTAACTCCCAGGAGAGTGTCACAGAGCAG
GACAGCAAGGACAGCACCTACAGCCTCAGCAGCACCCTGACGCTGAGCAAAGCAGACTACGA
GAAACACAAAGTCTATGCCTGCGAAGTCACCCATCAGGGCCTGAGCTCGCCCGTCACAAAGAG
CTTCAACAGGGGAGAGTGTTAG
Anti-Langerin15B10K-LV-hIgGK-C (SEQ ID NO: 121):
DVVMTQTPLSLPVRLGDQASISCRSSQSLVHSNGNTYLHWYLQKPGQSPKLLIYKVSNRFSGVPDR
FSGSGSGTNFTLKISRVEAEDLGLYFCSQSTHVPYTFGGGTKLEIKRTVAAPSVFIFPPSDEQLKSGT
ASVVCLLNNFYPREAKVQWKVDNALQSGNSQESVTEQDSKDSTYSLSSTLTLSKADYEKHKVYAC
EVTHQGLSSPVTKSFNRGEC
Anti-Langerin2G3H-LV-hIgG4H-C (SEQ ID NO: 57):
ATGACATTGAACATGCTGTTGGGGCTGAGGTGGGTTTTCTTTGTTGTTTTTTATCAAGGTGTGC
ATTGTGAGGTGCAGCTTGTTGAGTCTGGTGGAGGATTGGTGCAGCCTAAAGGGTCATTGAAAC
TCTCATGTGCAGCCTCTGGATTAACCTTCAATATCTACGCCATGAACTGGGTCCGCCAGGCTCC
AGGAAAGGGTTTGGAATGGGTTGCTCGCATAAGAAATAAAAGTAATAATTATGCAACATATTA
TGCCGATTCAGTGAAAGACAGGTTCACCATCTCCAGAGATGATTCACAAAGCTTGCTCTATCTG
CAAATGAACAACTTGAAAACTGAGGACACAGCCATGTATTACTGTGTGGGACGGGACTGGTTT
GATTACTGGGGCCAAGGGACTCTGGTCACTGTCTCTGCAGCCAAAACGAAGGGCCCATCCGTC
TTCCCCCTGGCGCCCTGCTCCAGGAGCACCTCCGAGAGCACAGCCGCCCTGGGCTGCCTGGTC
AAGGACTACTTCCCCGAACCGGTGACGGTGTCGTGGAACTCAGGCGCCCTGACCAGCGGCGTG
CACACCTTCCCGGCTGTCCTACAGTCCTCAGGACTCTACTCCCTCAGCAGCGTGGTGACCGTGC
CCTCCAGCAGCTTGGGCACGAAGACCTACACCTGCAACGTAGATCACAAGCCCAGCAACACCA
AGGTGGACAAGAGAGTTGAGTCCAAATATGGTCCCCCATGCCCACCCTGCCCAGCACCTGAGT
TCGAAGGGGGACCATCAGTCTTCCTGTTCCCCCCAAAACCCAAGGACACTCTCATGATCTCCCG
GACCCCTGAGGTCACGTGCGTGGTGGTGGACGTGAGCCAGGAAGACCCCGAGGTCCAGTTCAA
CTGGTACGTGGATGGCGTGGAGGTGCATAATGCCAAGACAAAGCCGCGGGAGGAGCAGTTCA
ACAGCACGTACCGTGTGGTCAGCGTCCTCACCGTCCTGCACCAGGACTGGCTGAACGGCAAGG
AGTACAAGTGCAAGGTCTCCAACAAAGGCCTCCCGTCCTCCATCGAGAAAACCATCTCCAAAG
CCAAAGGGCAGCCCCGAGAGCCACAGGTGTACACCCTGCCCCCATCCCAGGAGGAGATGACC
AAGAACCAGGTCAGCCTGACCTGCCTGGTCAAAGGCTTCTACCCCAGCGACATCGCCGTGGAG
TGGGAGAGCAATGGGCAGCCGGAGAACAACTACAAGACCACGCCTCCCGTGCTGGACTCCGA
CGGCTCCTTCTTCCTCTACAGCAGGCTAACCGTGGACAAGAGCAGGTGGCAGGAGGGGAATGT
CTTCTCATGCTCCGTGATGCATGAGGCTCTGCACAACCACTACACACAGAAGAGCCTCTCCCTG
TCTCTGGGTAAAGCTAGCTGA
Anti-Langerin2G3H-LV-hIgG4H-C (SEQ ID NO: 122):
MTLNMLLGLRWVFFVVFYQGVHCEVQLVESGGGLVQPKGSLKLSCAASGLTFNIYAMNWVRQAP
GKGLEWVARIRNKSNNYATYYADSVKDRFTISRDDSQSLLYLQMNNLKTEDTAMYYCVGRDWF
DYWGQGTLVTVSAAKTKGPSVFPLAPCSRSTSESTAALGCLVKDYFPEPVTVSWNSGALTSGVHTF
PAVLQSSGLYSLSSVVTVPSSSLGTKTYTCNVDHKPSNTKVDKRVESKYGPPCPPCPAPEFEGGPSV
FLFPPKPKDTLMISRTPEVTCVVVDVSQEDPEVQFNWYVDGVEVHNAKTKPREEQFNSTYRVVSV
LTVLHQDWLNGKEYKCKVSNKGLPSSIEKTISKAKGQPREPQVYTLPPSQEEMTKNQVSLTCLVKG
FYPSDIAVEWESNGQPENNYKTTPPVLDSDGSFFLYSRLTVDKSRWQEGNVFSCSVMHEALHNHY
TQKSLSLSLGKAS.
Anti-Langerin2G3L-LV-hIgGK-C (SEQ ID NO: 58):
ATGGCCTGGATTTCACTTATACTCTCTCTCCTGGCTCTCAGCTCAGGGGCCATTTCCCAGGCTGT
TGTGACTCAGGAATCTGCACTCACCACATCACCTGGTGAAACAGTCACACTCACTTGTCGCTCA
AGTACTGGGGCTGTTACAACTAGTAACTATGCCAACTGGGTCCAAGAAAAACCAGATCATTTA
TTCACTGGTCTAATAGGTGGTACCAACAACCGAGTTTCAGGTGTTCCTGCCAGATTCTCAGGCT
CCCTGATTGGAGACAAGGCTGCCCTCACCATCACAGGGGCACAGACTGAGGATGAGGCAATAT
ATTTCTGTGCTCTATGGTACAGCAACCATTGGGTGTTCGGTGGAGGAACCAAACTCGAGATCA
AACGAACTGTGGCTGCACCATCTGTCTTCATCTTCCCGCCATCTGATGAGCAGTTGAAATCTGG
AACTGCCTCTGTTGTGTGCCTGCTGAATAACTTCTATCCCAGAGAGGCCAAAGTACAGTGGAA
GGTGGATAACGCCCTCCAATCGGGTAACTCCCAGGAGAGTGTCACAGAGCAGGACAGCAAGG
ACAGCACCTACAGCCTCAGCAGCACCCTGACGCTGAGCAAAGCAGACTACGAGAAACACAAA
GTCTATGCCTGCGAAGTCACCCATCAGGGCCTGAGCTCGCCCGTCACAAAGAGCTTCAACAGG
GGAGAGTGTTAG
Anti-Langerin2G3L-LV-hIgGK-C (SEQ ID NO: 123):
MAWISLILSLLALSSGAISQAVVTQESALTTSPGETVTLTCRSSTGAVTTSNYANWVQEKPDHLFTG
LIGGTNNRVSGVPARFSGSLIGDKAALTITGAQTEDEAIYFCALWYSNHWVFGGGTKLEIKRTVAA
PSVFIFPPSDEQLKSGTASVVCLLNNFYPREAKVQWKVDNALQSGNSQESVTEQDSKDSTYSLSSTL
TLSKADYEKHKVYACEVTHQGLSSPVTKSFNRGEC
Anti-Lox_1_10F9H-LV-hIgG4H-C (SEQ ID NO: 59):
ATGGAATGGACCTGGGTCTTTCTCTTCCTCCTGTCAGTAACTGCAGGTGTCCACTCCCAGGTTC
AGCTGCAGCAGTCTGGAGCTGAGCTGATGAAGCCTGGGGCCTCAGTGAAGATATCCTGCAAGG
CTACTGGCTACACATTCGGTAGCTACTGGATAGAGTGGGTAAAGCAGAGGCCTGGACATGGCC
TTGAGTGGATTGGAGAGATTTTACCTGGAAGTGGTAATACTAACTACAATGAGAACTTCAAGG
GCAAGGCCACATTCACTGCAGATACATCCTCCAACACAGCCTACATGCAACTCACCAGTCTGA
CATCTGAGGACTCTGCCGTCTATTACTGTGCTAGGGCGGGGATTTATTGGGGCCAAGGGACTCT
GGTCACTGTCTCTGCAGCCAAAACGAAGGGCCCATCCGTCTTCCCCCTGGCGCCCTGCTCCAGG
AGCACCTCCGAGAGCACAGCCGCCCTGGGCTGCCTGGTCAAGGACTACTTCCCCGAACCGGTG
ACGGTGTCGTGGAACTCAGGCGCCCTGACCAGCGGCGTGCACACCTTCCCGGCTGTCCTACAG
TCCTCAGGACTCTACTCCCTCAGCAGCGTGGTGACCGTGCCCTCCAGCAGCTTGGGCACGAAG
ACCTACACCTGCAACGTAGATCACAAGCCCAGCAACACCAAGGTGGACAAGAGAGTTGAGTC
CAAATATGGTCCCCCATGCCCACCCTGCCCAGCACCTGAGTTCGAAGGGGGACCATCAGTCTT
CCTGTTCCCCCCAAAACCCAAGGACACTCTCATGATCTCCCGGACCCCTGAGGTCACGTGCGTG
GTGGTGGACGTGAGCCAGGAAGACCCCGAGGTCCAGTTCAACTGGTACGTGGATGGCGTGGA
GGTGCATAATGCCAAGACAAAGCCGCGGGAGGAGCAGTTCAACAGCACGTACCGTGTGGTCA
GCGTCCTCACCGTCCTGCACCAGGACTGGCTGAACGGCAAGGAGTACAAGTGCAAGGTCTCCA
ACAAAGGCCTCCCGTCCTCCATCGAGAAAACCATCTCCAAAGCCAAAGGGCAGCCCCGAGAG
CCACAGGTGTACACCCTGCCCCCATCCCAGGAGGAGATGACCAAGAACCAGGTCAGCCTGACC
TGCCTGGTCAAAGGCTTCTACCCCAGCGACATCGCCGTGGAGTGGGAGAGCAATGGGCAGCCG
GAGAACAACTACAAGACCACGCCTCCCGTGCTGGACTCCGACGGCTCCTTCTTCCTCTACAGC
AGGCTAACCGTGGACAAGAGCAGGTGGCAGGAGGGGAATGTCTTCTCATGCTCCGTGATGCAT
GAGGCTCTGCACAACCACTACACACAGAAGAGCCTCTCCCTGTCTCTGGGTAAAGCTAGCTGA
Anti-Lox_1_10F9H-LV-hIgG4H-C (SEQ ID NO: 124):
MEWTWVFLFLLSVTAGVHSQVQLQQSGAELMKPGASVKISCKATGYTFGSYWIEWVKQRPGHGL
EWIGEILPGSGNTNYNENFKGKATFTADTSSNTAYMQLTSLTSEDSAVYYCARAGIYWGQGTLVT
VSAAKTKGPSVFPLAPCSRSTSESTAALGCLVKDYFPEPVTVSWNSGALTSGVHTFPAVLQSSGLYS
LSSVVTVPSSSLGTKTYTCNVDHKPSNTKVDKRVESKYGPPCPPCPAPEFEGGPSVFLFPPKPKDTL
MISRTPEVTCVVVDVSQEDPEVQFNWYVDGVEVHNAKTKPREEQFNSTYRVVSVLTVLHQDWLN
GKEYKCKVSNKGLPSSIEKTISKAKGQPREPQVYTLPPSQEEMTKNQVSLTCLVKGFYPSDIAVEWE
SNGQPENNYKTTPPVLDSDGSFFLYSRLTVDKSRWQEGNVFSCSVMHEALHNHYTQKSLSLSLGK
AS
Anti-Lox_1_10F9K-LV-hIgGK-C (SEQ ID NO: 60):
ATGGAGAAAGACACACTCCTGCTATGGGTCCTGCTTCTCTGGGTTCCAGGTTCCACAGGTGAC
ATTGTGCTGACCCAATCTCCAGCTTTTTTGGCTGTGTCTCTAGGGCAGAGGGCCACCATCTCCT
GCAGAGCCAGCGAAAGTGTTGATAATTATGGCATTAGTTTTATGAACTGGTTCCAACAGAAAC
CAGGACAGCCACCCAAACTCCTCATCTATGTTGCATCCAAGCAAGGATCCGGGGTCCCTGCCA
GGTTTAGTGGCAGTGGGTCTGGGACAGACTTCAGCCTCAACATCCATCCTATGGAGGAGGATG
ATACTGCAATGTATTTCTGTCAGCAAAGTAAGGAGGTTCCTCGGACGTTCGGTGGAGGCACCA
AGCTCGAGATCAAACGAACTGTGGCTGCACCATCTGTCTTCATCTTCCCGCCATCTGATGAGCA
GTTGAAATCTGGAACTGCCTCTGTTGTGTGCCTGCTGAATAACTTCTATCCCAGAGAGGCCAAA
GTACAGTGGAAGGTGGATAACGCCCTCCAATCGGGTAACTCCCAGGAGAGTGTCACAGAGCA
GGACAGCAAGGACAGCACCTACAGCCTCAGCAGCACCCTGACGCTGAGCAAAGCAGACTACG
AGAAACACAAAGTCTATGCCTGCGAAGTCACCCATCAGGGCCTGAGCTCGCCCGTCACAAAGA
GCTTCAACAGGGGAGAGTGTTAG
Anti-Lox_1_10F9K-LV-hIgGK-C (SEQ ID NO: 125):
MEKDTLLLWVLLLWVPGSTGDIVLTQSPAFLAVSLGQRATISCRASESVDNYGISFMNWFQQKPG
QPPKLLIYVASKQGSGVPARFSGSGSGTDFSLNIHPMEEDDTAMYFCQQSKEVPRTFGGGTKLEIKR
TVAAPSVFIFPPSDEQLKSGTASVVCLLNNFYPREAKVQWKVDNALQSGNSQESVTEQDSKDSTYS
LSSTLTLSKADYEKHKVYACEVTHQGLSSPVTKSFNRGEC
Anti-LOX-111C8H-LV-hIgG4H-C (SEQ ID NO: 61):
ATGGAATGTAACTGGATACTTCCTTTTATTCTGTCGGTAACTTCAGGGGTCTACTCAGAGGTTC
AGCTCCAGCAGTCTGGGACTGTGCTGGCAAGGCCTGGGGCTTCAGTGAAGATGTCCTGCAAGG
CTTCTGGCTACACCTTTACCAGCTACTGGATGCACTGGGTAAAACAGAGGCCTGGACAGGGTC
TGGAATGGATTGGCGCTATTTATCCTGGAAATAGTGATACTACCTACAACCAGAAGTTCAAGG
GCAAGGCCAAACTGACTGCAGTCACATCCACCAGCACTGCCTACATGGAGCTCAGCAGCCTGA
CAAATGAGGACTCTGCGGTCTATTACTGTACACCTACTTACTACTTTGACTACTGGGGCCAAGG
CACCTCTCTCACAGTCTCCTCAGCCAAAACGAAGGGCCCATCCGTCTTCCCCCTGGCGCCCTGC
TCCAGGAGCACCTCCGAGAGCACAGCCGCCCTGGGCTGCCTGGTCAAGGACTACTTCCCCGAA
CCGGTGACGGTGTCGTGGAACTCAGGCGCCCTGACCAGCGGCGTGCACACCTTCCCGGCTGTC
CTACAGTCCTCAGGACTCTACTCCCTCAGCAGCGTGGTGACCGTGCCCTCCAGCAGCTTGGGCA
CGAAGACCTACACCTGCAACGTAGATCACAAGCCCAGCAACACCAAGGTGGACAAGAGAGTT
GAGTCCAAATATGGTCCCCCATGCCCACCCTGCCCAGCACCTGAGTTCGAAGGGGGACCATCA
GTCTTCCTGTTCCCCCCAAAACCCAAGGACACTCTCATGATCTCCCGGACCCCTGAGGTCACGT
GCGTGGTGGTGGACGTGAGCCAGGAAGACCCCGAGGTCCAGTTCAACTGGTACGTGGATGGC
GTGGAGGTGCATAATGCCAAGACAAAGCCGCGGGAGGAGCAGTTCAACAGCACGTACCGTGT
GGTCAGCGTCCTCACCGTCCTGCACCAGGACTGGCTGAACGGCAAGGAGTACAAGTGCAAGGT
CTCCAACAAAGGCCTCCCGTCCTCCATCGAGAAAACCATCTCCAAAGCCAAAGGGCAGCCCCG
AGAGCCACAGGTGTACACCCTGCCCCCATCCCAGGAGGAGATGACCAAGAACCAGGTCAGCC
TGACCTGCCTGGTCAAAGGCTTCTACCCCAGCGACATCGCCGTGGAGTGGGAGAGCAATGGGC
AGCCGGAGAACAACTACAAGACCACGCCTCCCGTGCTGGACTCCGACGGCTCCTTCTTCCTCT
ACAGCAGGCTAACCGTGGACAAGAGCAGGTGGCAGGAGGGGAATGTCTTCTCATGCTCCGTG
ATGCATGAGGCTCTGCACAACCACTACACACAGAAGAGCCTCTCCCTGTCTCTGGGTAAAGCT
AGCTGA
Anti-LOX-111C8H-LV-hIgG4H-C (SEQ ID NO: 126):
MECNWILPFILSVTSGVYSEVQLQQSGTVLARPGASVKMSCKASGYTFTSYWMHWVKQRPGQGL
EWIGAIYPGNSDTTYNQKFKGKAKLTAVTSTSTAYMELSSLTNEDSAVYYCTPTYYFDYWGQGTS
LTVSSAKTKGPSVFPLAPCSRSTSESTAALGCLVKDYFPEPVTVSWNSGALTSGVHTFPAVLQSSGL
YSLSSVVTVPSSSLGTKTYTCNVDHKPSNTKVDKRVESKYGPPCPPCPAPEFEGGPSVFLFPPKPKD
TLMISRTPEVTCVVVDVSQEDPEVQFNWYVDGVEVHNAKTKPREEQFNSTYRVVSVLTVLHQDW
LNGKEYKCKVSNKGLPSSIEKTISKAKGQPREPQVYTLPPSQEEMTKNQVSLTCLVKGFYPSDIAVE
WESNGQPENNYKTTPPVLDSDGSFFLYSRLTVDKSRWQEGNVFSCSVMHEALHNHYTQKSLSLSL
GKAS
Anti-LOX-111C8K-LV-hIgGK-C (SEQ ID NO: 62):
ATGAGTCCTGCCCAATTCCTGTTTCTGTTAGTGCTCTGGATTCGGGAAACCAACGGTGATGTTG
TGATGACCCAGACTCCACTCACTTTGTCGGTTACCATTGGACAACCAGCCTCCATCTCTTGCAA
GTCAAGTCAGAGCCTCTTAGATAGTGATGGAAAGACATATTTGAATTGGTTCTTACAGAGGCC
AGGCCAGTCTCCAAAGCGCCTAATCTATCTGGTGTCTAAACTGGACTCTGGAGTCCCTGACAG
GTTCACTGGCAGTGGATCAGGGACAGATTTCACACTGAAAATCAGCAGAGTGGAGGCTGAGG
ATTTGGGAGTTTATTATTGCTGGCAAGGTACACATTTTCCGTGGACGTTCGGTGGAGGCACCAA
GCTCGAGATCAAACGAACTGTGGCTGCACCATCTGTCTTCATCTTCCCGCCATCTGATGAGCAG
TTGAAATCTGGAACTGCCTCTGTTGTGTGCCTGCTGAATAACTTCTATCCCAGAGAGGCCAAAG
TACAGTGGAAGGTGGATAACGCCCTCCAATCGGGTAACTCCCAGGAGAGTGTCACAGAGCAG
GACAGCAAGGACAGCACCTACAGCCTCAGCAGCACCCTGACGCTGAGCAAAGCAGACTACGA
GAAACACAAAGTCTATGCCTGCGAAGTCACCCATCAGGGCCTGAGCTCGCCCGTCACAAAGAG
CTTCAACAGGGGAGAGTGTTAG
Anti-LOX-111C8K-LV-hIgGK-C (SEQ ID NO: 127):
MSPAQFLFLLVLWIRETNGDVVMTQTPLTLSVTIGQPASISCKSSQSLLDSDGKTYLNWFLQRPGQS
PKRLIYLVSKLDSGVPDRFTGSGSGTDFTLKISRVEAEDLGVYYCWQGTHFPWTFGGGTKLEIKRT
VAAPSVFIFPPSDEQLKSGTASVVCLLNNFYPREAKVQWKVDNALQSGNSQESVTEQDSKDSTYSL
SSTLTLSKADYEKHKVYACEVTHQGLSSPVTKSFNRGEC
Anti-LOX-115C4H-LV-hIgG4H-C (SEQ ID NO: 63):
ATGGGAGGGATCTGGATCTTTCTCTTCCTCCTGTCAGGAACTGCAGGTGCCCACTCTGAGATCC
AGCTGCAGCAGACTGGACCTGAGCTGGTGAAGCCTGGGGCTTCAGTGAAGATATCCTGCAAGG
CTTCTGGTTATCCATTCACTGACTACATCATGGTCTGGGTGAAGCAGAGCCATGGAAAGAGCC
TTGAGTGGATTGGAAATATTAGTCCTTACTATGGTACTACTAACTACAATCTGAAGTTCAAGGG
CAAGGCCACATTGACTGTAGACAAATCTTCCAGCACAGCCTACATGCAGCTCAACAGTCTGAC
ATCTGAGGACTCTGCAGTCTATTACTGTGCAAGATCCCCTAACTGGGACGGGGCCTGGTTTGCT
CACTGGGGCCAAGGGGCTCTGGTCACTGTCTCTGCAGCCAAAACAAAGGGCCCATCCGTCTTC
CCCCTGGCGCCCTGCTCCAGGAGCACCTCCGAGAGCACAGCCGCCCTGGGCTGCCTGGTCAAG
GACTACTTCCCCGAACCGGTGACGGTGTCGTGGAACTCAGGCGCCCTGACCAGCGGCGTGCAC
ACCTTCCCGGCTGTCCTACAGTCCTCAGGACTCTACTCCCTCAGCAGCGTGGTGACCGTGCCCT
CCAGCAGCTTGGGCACGAAGACCTACACCTGCAACGTAGATCACAAGCCCAGCAACACCAAG
GTGGACAAGAGAGTTGAGTCCAAATATGGTCCCCCATGCCCACCCTGCCCAGCACCTGAGTTC
GAAGGGGGACCATCAGTCTTCCTGTTCCCCCCAAAACCCAAGGACACTCTCATGATCTCCCGG
ACCCCTGAGGTCACGTGCGTGGTGGTGGACGTGAGCCAGGAAGACCCCGAGGTCCAGTTCAAC
TGGTACGTGGATGGCGTGGAGGTGCATAATGCCAAGACAAAGCCGCGGGAGGAGCAGTTCAA
CAGCACGTACCGTGTGGTCAGCGTCCTCACCGTCCTGCACCAGGACTGGCTGAACGGCAAGGA
GTACAAGTGCAAGGTCTCCAACAAAGGCCTCCCGTCCTCCATCGAGAAAACCATCTCCAAAGC
CAAAGGGCAGCCCCGAGAGCCACAGGTGTACACCCTGCCCCCATCCCAGGAGGAGATGACCA
AGAACCAGGTCAGCCTGACCTGCCTGGTCAAAGGCTTCTACCCCAGCGACATCGCCGTGGAGT
GGGAGAGCAATGGGCAGCCGGAGAACAACTACAAGACCACGCCTCCCGTGCTGGACTCCGAC
GGCTCCTTCTTCCTCTACAGCAGGCTAACCGTGGACAAGAGCAGGTGGCAGGAGGGGAATGTC
TTCTCATGCTCCGTGATGCATGAGGCTCTGCACAACCACTACACACAGAAGAGCCTCTCCCTGT
CTCTGGGTAAAGCTAGCTGATTAATTAA
Anti-LOX-115C4H-LV-hIgG4H-C (SEQ ID NO: 128):
MGGIWIFLFLLSGTAGAHSEIQLQQTGPELVKPGASVKISCKASGYPFTDYIMVWVKQSHGKSLEW
IGNISPYYGTTNYNLKFKGKATLTVDKSSSTAYMQLNSLTSEDSAVYYCARSPNWDGAWFAHWG
QGALVTVSAAKTKGPSVFPLAPCSRSTSESTAALGCLVKDYFPEPVTVSWNSGALTSGVHTFPAVL
QSSGLYSLSSVVTVPSSSLGTKTYTCNVDHKPSNTKVDKRVESKYGPPCPPCPAPEFEGGPSVFLFPP
KPKDTLMISRTPEVTCVVVDVSQEDPEVQFNWYVDGVEVHNAKTKPREEQFNSTYRVVSVLTVLH
QDWLNGKEYKCKVSNKGLPSSIEKTISKAKGQPREPQVYTLPPSQEEMTKNQVSLTCLVKGFYPSD
IAVEWESNGQPENNYKTTPPVLDSDGSFFLYSRLTVDKSRWQEGNVFSCSVMHEALHNHYTQKSL
SLSLGKAS
Anti-LOX-115C4K-LV-hIgGK-C (SEQ ID NO: 64):
ATGGAGACAGACACAATCCTGCTATGGGTGCTGCTGCTCTGGGTTCCAGGCTCCACTGGTGAC
ATTGTGCTGACCCAATCTCCAGCTTCTTTGGCTGTGTCTCTAGGGCAGAGGGCCACCATCTCCT
GCAAGGCCAGCCAAAGTGTTGATTATGATGGTGATAGTTATATGAACTGGTTCCAACAGAAAC
CAGGACAGCCACCCAAACTCCTCATCTATGCTGCATCCAATCTAGAATCTGGGATCCCAGCCA
GGTTTAGTGGCAGTGGGTCTGGGACAGACTTCACCCTCAACATCCATCCTGTGGAGGAGGAGG
ATGCTGCAACCTATTACTGTCAGCAAAGTAATGAGGATCCATTCACGTTCGGCTCGGGGACAA
AGCTCGAGATCAAACGAACTGTGGCTGCACCATCTGTCTTCATCTTCCCGCCATCTGATGAGCA
GTTGAAATCTGGAACTGCCTCTGTTGTGTGCCTGCTGAATAACTTCTATCCCAGAGAGGCCAAA
GTACAGTGGAAGGTGGATAACGCCCTCCAATCGGGTAACTCCCAGGAGAGTGTCACAGAGCA
GGACAGCAAGGACAGCACCTACAGCCTCAGCAGCACCCTGACGCTGAGCAAAGCAGACTACG
AGAAACACAAAGTCTATGCCTGCGAAGTCACCCATCAGGGCCTGAGCTCGCCCGTCACAAAGA
GCTTCAACAGGGGAGAGTGTTAG
Anti-LOX-115C4K-LV-hIgGK-C (SEQ ID NO: 129):
METDTILLWVLLLWVPGSTGDIVLTQSPASLAVSLGQRATISCKASQSVDYDGDSYMNWFQQKPG
QPPKLLIYAASNLESGIPARFSGSGSGTDFTLNIHPVEEEDAATYYCQQSNEDPFTFGSGTKLEIKRT
VAAPSVFIFPPSDEQLKSGTASVVCLLNNFYPREAKVQWKVDNALQSGNSQESVTEQDSKDSTYSL
SSTLTLSKADYEKHKVYACEVTHQGLSSPVTKSFNRGEC
Anti-Marco_10B7.3G4H-LV-hIgG4H-C (SEQ ID NO: 65):
ATGGCTGTCCTGGGGCTGCTTCTCTGCCTGGTGACGTTCCCAAGCTGTGTCCTGTCCCAGGTGC
AGCTGAAGGAGTCAGGACCTGGCCTGGTGGCACCCTCACAGAGCCTGTCCATCACATGCACTG
TCTCTGGGTTCTCATTATCCAGATATAGTGTATTTTGGGTTCGCCAGCCTCCAGGAAAGGGTCT
GGAGTGGCTGGGATTGATATGGGGTGGTGGAAGCACAGACTATAATTCAGCTCTCAAATCCAG
ACTGAGCATCAGCAAGGACAACTCCAAGAGCCAAGTTTTCTTAAAAATGAACAGTCTGCAAAC
TGATGACACAGCCATGTACTACTGTGCCAGAATCTACTTTGATTACGACGGGGCTATGGACTA
CTGGGGTCAAGGAACCTCAGTCACCGTCTCCTCAGCCAAAACAACGGGCCCATCCGTCTTCCC
CCTGGCGCCCTGCTCCAGGAGCACCTCCGAGAGCACAGCCGCCCTGGGCTGCCTGGTCAAGGA
CTACTTCCCCGAACCGGTGACGGTGTCGTGGAACTCAGGCGCCCTGACCAGCGGCGTGCACAC
CTTCCCGGCTGTCCTACAGTCCTCAGGACTCTACTCCCTCAGCAGCGTGGTGACCGTGCCCTCC
AGCAGCTTGGGCACGAAGACCTACACCTGCAACGTAGATCACAAGCCCAGCAACACCAAGGT
GGACAAGAGAGTTGAGTCCAAATATGGTCCCCCATGCCCACCCTGCCCAGCACCTGAGTTCGA
AGGGGGACCATCAGTCTTCCTGTTCCCCCCAAAACCCAAGGACACTCTCATGATCTCCCGGAC
CCCTGAGGTCACGTGCGTGGTGGTGGACGTGAGCCAGGAAGACCCCGAGGTCCAGTTCAACTG
GTACGTGGATGGCGTGGAGGTGCATAATGCCAAGACAAAGCCGCGGGAGGAGCAGTTCAACA
GCACGTACCGTGTGGTCAGCGTCCTCACCGTCCTGCACCAGGACTGGCTGAACGGCAAGGAGT
ACAAGTGCAAGGTCTCCAACAAAGGCCTCCCGTCCTCCATCGAGAAAACCATCTCCAAAGCCA
AAGGGCAGCCCCGAGAGCCACAGGTGTACACCCTGCCCCCATCCCAGGAGGAGATGACCAAG
AACCAGGTCAGCCTGACCTGCCTGGTCAAAGGCTTCTACCCCAGCGACATCGCCGTGGAGTGG
GAGAGCAATGGGCAGCCGGAGAACAACTACAAGACCACGCCTCCCGTGCTGGACTCCGACGG
CTCCTTCTTCCTCTACAGCAGGCTAACCGTGGACAAGAGCAGGTGGCAGGAGGGGAATGTCTT
CTCATGCTCCGTGATGCATGAGGCTCTGCACAACCACTACACACAGAAGAGCCTCTCCCTGTCT
CTGGGTAAAGCTAGCTG
Anti-Marco_10B7.3G4H-LV-hIgG4H-C (SEQ ID NO: 130):
MAVLGLLLCLVTFPSCVLSQVQLKESGPGLVAPSQSLSITCTVSGFSLSRYSVFWVRQPPGKGLEWL
GLIWGGGSTDYNSALKSRLSISKDNSKSQVFLKMNSLQTDDTAMYYCARIYFDYDGAMDYWGQG
TSVTVSSAKTTGPSVFPLAPCSRSTSESTAALGCLVKDYFPEPVTVSWNSGALTSGVHTFPAVLQSS
GLYSLSSVVTVPSSSLGTKTYTCNVDHKPSNTKVDKRVESKYGPPCPPCPAPEFEGGPSVFLFPPKP
KDTLMISRTPEVTCVVVDVSQEDPEVQFNWYVDGVEVHNAKTKPREEQFNSTYRVVSVLTVLHQ
DWLNGKEYKCKVSNKGLPSSIEKTISKAKGQPREPQVYTLPPSQEEMTKNQVSLTCLVKGFYPSDI
AVEWESNGQPENNYKTTPPVLDSDGSFFLYSRLTVDKSRWQEGNVFSCSVMHEALHNHYTQKSLS
LSLGKAS
AntiMarco_10B7.3G4K_H-V-hIgGK-C (SEQ ID NO: 66):
ATGCATCGCACCAGCATGGGCATCAAGATGGAGTCACGGATTCAGGCATTTGTATTCGTGTTTC
TCTGGTTGTCTGGTGTTGGCGGAGACATTGTGATGACCCAGTCTCACAAATTCATGTCCACATC
AGTAGGAGACAGGGTCAGCGTCACCTGCAAGGCCAGTCAGGATGTGACTTCTGCTGTAGCCTG
GTATCAACAAAAACCAGGGCAATCTCCTAAACTACTGATTTACTGGGCATCCACCCGGCACAC
TGGAGTCCCTGATCGCTTCACAGGCAGTGGATCTGGGACAGATTATACTCTCACCATCAGCAG
TGGGCAGGCTGAAGACCTGGCACTTTATTACTGTCACCAATATTATAGCGCTCCTCGGACGTTC
GGTGGAGGCACCAAGCTCGAGATCAAACGAACTGTGGCTGCACCATCTGTCTTCATCTTCCCG
CCATCTGATGAGCAGTTGAAATCTGGAACTGCCTCTGTTGTGTGCCTGCTGAATAACTTCTATC
CCAGAGAGGCCAAAGTACAGTGGAAGGTGGATAACGCCCTCCAATCGGGTAACTCCCAGGAG
AGTGTCACAGAGCAGGACAGCAAGGACAGCACCTACAGCCTCAGCAGCACCCTGACGCTGAG
CAAAGCAGACTACGAGAAACACAAAGTCTATGCCTGCGAAGTCACCCATCAGGGCCTGAGCTC
GCCCGTCACAAAGAGCTTCAACAGGGGAGAGTGTTAG
AntiMarco_10B7.3G4K_H-V-hIgGK-C (SEQ ID NO: 131):
MHRTSMGIKMESRIQAFVFVFLWLSGVGGDIVMTQSHKFMSTSVGDRVSVTCKASQDVTSAVAW
YQQKPGQSPKLLIYWASTRHTGVPDRFTGSGSGTDYTLTISSGQAEDLALYYCHQYYSAPRTFGGG
TKLEIKRTVAAPSVFIFPPSDEQLKSGTASVVCLLNNFYPREAKVQWKVDNALQSGNSQESVTEQD
SKDSTYSLSSTLTLSKADYEKHKVYACEVTHQGLSSPVTKSFNRGEC
Anti-Marco_11A8.3C9_H-V-hIgG4H-C (SEQ ID NO: 67):
ATGGAATGGAACTGGGTCGTTCTCTTCCTCCTGTCATTAACTGCAGGTGTCTATGCCCAGGGTC
AGATGCAGCAGTCTGGAGCTGAGCTGGTGAAGCCTGGGGCTTCAGTGAAGCTGTCCTGCAAGA
CTTCTGGCTTCACCTTCAGCAGTAACTATATAAGTTGGTTGAAGCAAAAGCCTGGACAGAGTCT
TGAGTGGATTGCATGGATTTATGCTGGAACTGGTGGTATTACCTATAATCAGAAGTTCAGAGG
CAGGGCCCAACTGACTGTAGACACATCCTCCAGCACAGCCTACATGCAGTTCAGCAGCCTGAC
AACTGATGACTCTGCCATCTATTACTGTGCAAGACACGTGAGGGGTTACCATCCTATGGACTAC
TGGGGTCAAGGAACCTCAGTCACCGTCTCCTCAGCCAAAACGAAGGGCCCATCCGTCTTCCCC
CTGGCGCCCTGCTCCAGGAGCACCTCCGAGAGCACAGCCGCCCTGGGCTGCCTGGTCAAGGAC
TACTTCCCCGAACCGGTGACGGTGTCGTGGAACTCAGGCGCCCTGACCAGCGGCGTGCACACC
TTCCCGGCTGTCCTACAGTCCTCAGGACTCTACTCCCTCAGCAGCGTGGTGACCGTGCCCTCCA
GCAGCTTGGGCACGAAGACCTACACCTGCAACGTAGATCACAAGCCCAGCAACACCAAGGTG
GACAAGAGAGTTGAGTCCAAATATGGTCCCCCATGCCCACCCTGCCCAGCACCTGAGTTCGAA
GGGGGACCATCAGTCTTCCTGTTCCCCCCAAAACCCAAGGACACTCTCATGATCTCCCGGACCC
CTGAGGTCACGTGCGTGGTGGTGGACGTGAGCCAGGAAGACCCCGAGGTCCAGTTCAACTGGT
ACGTGGATGGCGTGGAGGTGCATAATGCCAAGACAAAGCCGCGGGAGGAGCAGTTCAACAGC
ACGTACCGTGTGGTCAGCGTCCTCACCGTCCTGCACCAGGACTGGCTGAACGGCAAGGAGTAC
AAGTGCAAGGTCTCCAACAAAGGCCTCCCGTCCTCCATCGAGAAAACCATCTCCAAAGCCAAA
GGGCAGCCCCGAGAGCCACAGGTGTACACCCTGCCCCCATCCCAGGAGGAGATGACCAAGAA
CCAGGTCAGCCTGACCTGCCTGGTCAAAGGCTTCTACCCCAGCGACATCGCCGTGGAGTGGGA
GAGCAATGGGCAGCCGGAGAACAACTACAAGACCACGCCTCCCGTGCTGGACTCCGACGGCT
CCTTCTTCCTCTACAGCAGGCTAACCGTGGACAAGAGCAGGTGGCAGGAGGGGAATGTCTTCT
CATGCTCCGTGATGCATGAGGCTCTGCACAACCACTACACACAGAAGAGCCTCTCCCTGTCTCT
GGGTAAAGCTAGCTGA
Anti-Marco_11A8.3C9_H-V-hIgG4H-C (SEQ ID NO: 132):
MEWNWVVLFLLSLTAGVYAQGQMQQSGAELVKPGASVKLSCKTSGFTFSSNYISWLKQKPGQSL
EWIAWIYAGTGGITYNQKFRGRAQLTVDTSSSTAYMQFSSLTTDDSAIYYCARHVRGYHPMDYW
GQGTSVTVSSAKTKGPSVFPLAPCSRSTSESTAALGCLVKDYFPEPVTVSWNSGALTSGVHTFPAVL
QSSGLYSLSSVVTVPSSSLGTKTYTCNVDHKPSNTKVDKRVESKYGPPCPPCPAPEFEGGPSVFLFPP
KPKDTLMISRTPEVTCVVVDVSQEDPEVQFNWYVDGVEVHNAKTKPREEQFNSTYRVVSVLTVLH
QDWLNGKEYKCKVSNKGLPSSIEKTISKAKGQPREPQVYTLPPSQEEMTKNQVSLTCLVKGFYPSD
IAVEWESNGQPENNYKTTPPVLDSDGSFFLYSRLTVDKSRWQEGNVFSCSVMHEALHNHYTQKSL
SLSLGKAS
Anti-Marco_11A8.3C9_H-V-hIgGK-C (SEQ ID NO: 68):
ATGGAGTCACAGACTCAGGTCTTTGTATACATGTTGCTGTGGTTGTCTGGTGTTGATGGAGACA
TTGTGATGACCCAGTCTCAAAAATTCATGTCCGCATCAGTAGGGGACAGGGTCAGCGTCACCT
GCAGGGCCAGTCAGAATGTGGTTACTAATGTAGGCTGGTATCAACAGAAACCAGGGCAATCTC
CTAAAGTACTGATTTACTCGGCATCCTTCCGGTACAGTGGAGTCCCTGATCGCTTCACAGGCAG
TGGATCTGGGACAGATTTCACTCTCACCATCACCAATGTGCAGTCTGAAGACTTGGCAGAGTA
TTTCTGTCAGCAATATAACAACTATCCGTACACGTTCGGAGGGGGGACCAAGCTCGAGATCAA
ACGAACTGTGGCTGCACCATCTGTCTTCATCTTCCCGCCATCTGATGAGCAGTTGAAATCTGGA
ACTGCCTCTGTTGTGTGCCTGCTGAATAACTTCTATCCCAGAGAGGCCAAAGTACAGTGGAAG
GTGGATAACGCCCTCCAATCGGGTAACTCCCAGGAGAGTGTCACAGAGCAGGACAGCAAGGA
CAGCACCTACAGCCTCAGCAGCACCCTGACGCTGAGCAAAGCAGACTACGAGAAACACAAAG
TCTATGCCTGCGAAGTCACCCATCAGGGCCTGAGCTCGCCCGTCACAAAGAGCTTCAACAGGG
GAGAGTGTTAG
Anti-Marco_11A8.3C9_H-V-hIgGK-C (SEQ ID NO: 133):
MESQTQVFVYMLLWLSGVDGDIVMTQSQKFMSASVGDRVSVTCRASQNVVTNVGWYQQKPGQS
PKVLIYSASFRYSGVPDRFTGSGSGTDFTLTITNVQSEDLAEYFCQQYNNYPYTFGGGTKLEIKRTV
AAPSVFIFPPSDEQLKSGTASVVCLLNNFYPREAKVQWKVDNALQSGNSQESVTEQDSKDSTYSLS
STLTLSKADYEKHKVYACEVTHQGLSSPVTKSFNRGEC
Anti-Marco_3H10.1F3_H-V-hIgG4H-C (SEQ ID NO: 69):
ATGGGATGGAGCTATATCATCCTCTTTTTGGTAGCAACAGCTACAGATGTCCACTCCCAGGTCC
AACTGCAGCAGCCTGGGGCTGAACTGGTGAAGCCTGGGGCTTCAGTGAAGCTGTCCTGCAAGG
CTTCTGGCTACACCTTCACCAGCTACTGGATGCACTGGGTGAAGCAGAGGCCTGGAGAAGGCC
TTGAGTGGATTGGAGAGATTAATCCTAGCTACGGTCGTACTGACTACAATGGGAAGTTCAAGA
ACAAGGCCACACTGACTGTAGCCAAATCCTCCAGCACAGCCTACATGCAACTCAGCAGCCTGA
CATCTGAGGACTCTGCGGTCTATTACTGTGCAAGAGGAGATTACTACGGTAGTAGCTCGTTTGC
TTACTGGGGCCAAGGGACTCTGGTCACTGTCTCTGCAGCCAAAACAAAGGGCCCATCCGTCTT
CCCCCTGGCGCCCTGCTCCAGGAGCACCTCCGAGAGCACAGCCGCCCTGGGCTGCCTGGTCAA
GGACTACTTCCCCGAACCGGTGACGGTGTCGTGGAACTCAGGCGCCCTGACCAGCGGCGTGCA
CACCTTCCCGGCTGTCCTACAGTCCTCAGGACTCTACTCCCTCAGCAGCGTGGTGACCGTGCCC
TCCAGCAGCTTGGGCACGAAGACCTACACCTGCAACGTAGATCACAAGCCCAGCAACACCAA
GGTGGACAAGAGAGTTGAGTCCAAATATGGTCCCCCATGCCCACCCTGCCCAGCACCTGAGTT
CGAAGGGGGACCATCAGTCTTCCTGTTCCCCCCAAAACCCAAGGACACTCTCATGATCTCCCG
GACCCCTGAGGTCACGTGCGTGGTGGTGGACGTGAGCCAGGAAGACCCCGAGGTCCAGTTCAA
CTGGTACGTGGATGGCGTGGAGGTGCATAATGCCAAGACAAAGCCGCGGGAGGAGCAGTTCA
ACAGCACGTACCGTGTGGTCAGCGTCCTCACCGTCCTGCACCAGGACTGGCTGAACGGCAAGG
AGTACAAGTGCAAGGTCTCCAACAAAGGCCTCCCGTCCTCCATCGAGAAAACCATCTCCAAAG
CCAAAGGGCAGCCCCGAGAGCCACAGGTGTACACCCTGCCCCCATCCCAGGAGGAGATGACC
AAGAACCAGGTCAGCCTGACCTGCCTGGTCAAAGGCTTCTACCCCAGCGACATCGCCGTGGAG
TGGGAGAGCAATGGGCAGCCGGAGAACAACTACAAGACCACGCCTCCCGTGCTGGACTCCGA
CGGCTCCTTCTTCCTCTACAGCAGGCTAACCGTGGACAAGAGCAGGTGGCAGGAGGGGAATGT
CTTCTCATGCTCCGTGATGCATGAGGCTCTGCACAACCACTACACACAGAAGAGCCTCTCCCTG
TCTCTGGGTAAAGCTAGCTGA
Anti-Marco_3H10.1F3_H-V-hIgG4H-C (SEQ ID NO: 134):
MGWSYIILFLVATATDVHSQVQLQQPGAELVKPGASVKLSCKASGYTFTSYWMHWVKQRPGEGL
EWIGEINPSYGRTDYNGKFKNKATLTVAKSSSTAYMQLSSLTSEDSAVYYCARGDYYGSSSFAYW
GQGTLVTVSAAKTKGPSVFPLAPCSRSTSESTAALGCLVKDYFPEPVTVSWNSGALTSGVHTFPAV
LQSSGLYSLSSVVTVPSSSLGTKTYTCNVDHKPSNTKVDKRVESKYGPPCPPCPAPEFEGGPSVFLFP
PKPKDTLMISRTPEVTCVVVDVSQEDPEVQFNWYVDGVEVHNAKTKPREEQFNSTYRVVSVLTVL
HQDWLNGKEYKCKVSNKGLPSSIEKTISKAKGQPREPQVYTLPPSQEEMTKNQVSLTCLVKGFYPS
DIAVEWESNGQPENNYKTTPPVLDSDGSFFLYSRLTVDKSRWQEGNVFSCSVMHEALHNHYTQKS
LSLSLGKAS
Anti-Marco_3H10.1F3_K-V-hIgGK-C (SEQ ID NO: 70):
ATGGAGTCACAGACTCAGGTCTTTGTATACATGTTGCTGTGGTTGTCTGGTGTTGATGGAGACA
TTGTGATGACCCAGTCTCAAAAATTCATGTCCACATCATTAGGAGACAGGGTCAGCGTCACCT
GCAAGGCCAGTCAGAATGTGGGTACTAATGTAGCCTGGTATCAACAGAAACCAGGGCACTCTC
CTAAAGCACTGATTTACTCGGCATCCTACCGGTACAGTGGAGTCCCTGATCGCTTCACAGGCA
GTGGATCTGGGACAGATTTCACTCTCACCATCAGCAATGTGCAGTCTGAAGACTTGGCAGAGT
TTTTCTGTCAGCAATATAACAACTATCCGTACACGTTCGGAGGGGGGACCACGCTCGAGATCA
AACGAACTGTGGCTGCACCATCTGTCTTCATCTTCCCGCCATCTGATGAGCAGTTGAAATCTGG
AACTGCCTCTGTTGTGTGCCTGCTGAATAACTTCTATCCCAGAGAGGCCAAAGTACAGTGGAA
GGTGGATAACGCCCTCCAATCGGGTAACTCCCAGGAGAGTGTCACAGAGCAGGACAGCAAGG
ACAGCACCTACAGCCTCAGCAGCACCCTGACGCTGAGCAAAGCAGACTACGAGAAACACAAA
GTCTATGCCTGCGAAGTCACCCATCAGGGCCTGAGCTCGCCCGTCACAAAGAGCTTCAACAGG
GGAGAGTGTTAG
Anti-Marco_3H10.1F3_K-V-hIgGK-C (SEQ ID NO: 135):
MESQTQVFVYMLLWLSGVDGDIVMTQSQKFMSTSLGDRVSVTCKASQNVGTNVAWYQQKPGHS
PKALIYSASYRYSGVPDRFTGSGSGTDFTLTISNVQSEDLAEFFCQQYNNYPYTFGGGTTLEIKRTV
AAPSVFIFPPSDEQLKSGTASVVCLLNNFYPREAKVQWKVDNALQSGNSQESVTEQDSKDSTYSLS
STLTLSKADYEKHKVYACEVTHQGLSSPVTKSFNRGEC

[0053] FIGS. 6A (non-reduced polyacrylamide gel) and 6B (reduced polyacrylamide gel) are PAGE gels that show the expression of the constructs listed as follows: In FIG. 6A—Lane 1. hIgG4-Flex-v1-m.tbRv1980-f4-m.tbRv0288-f2-m.tbAg85BDel41; Lane 2. manti-CD40_{—}12E12.3F3-hIgG4HC-Flex-v1m.tbRv1980-f4-m.tbRv0288-f2-m.tbAg85BDel41; Lane 3. mAnti-DCIR_{—}9E8-hIgG4-C-Flex-v1-m.tbRv1980-f4-m.tbRv0288-f2-m.tbAg85BDel41; Lane 4. hIgG4-Flex-v1-m.tbAg85BDel4142-m.tbESAT644-m.tbRv1980; Lane 5. manti-CD40_{—}12E12-hIgG4-C-Flex-v1-m.tbAg85BDel4142-m.tbESAT644-m.tbRv1980; Lane 6. hIgG4-Flex-v1-m.tbRv1980-f4-m.tbRv0288-f2-m.tbAg85BDel41; Lane 7. manti-CD40_{—}12E12.3F3-hIgG4HC-Flex-v1-m.tbRv1980-f4-m.tbRv0288-f2-m.tbAg85BDel41; Lane 8. mAnti-DCIR_{—}9E8-hIgG4-C-Flex-v1-m.tbRv1980-f4-m.tbRv0288-f2-m.tbAg85BDel41; Lane 9. hIgG4-Flex-v1-m.tbAg85BDel41-f2-m.tbESAT6-f4-m.tbRv1980; Lane 10. manti-CD40_{—}12E12-hIgG4-C-Flex-v1-m.tbAg85BDel41-f2-m.tbESAT6-f4-m.tbRv1980. In FIG. 6B—Lane 1. hIgG4-Flex-v1-m.tbRv1980-f4-m.tbRv0288-f2-m.tbAg85BDel41; Lane 2. manti-CD40_{—}12E12.3F3-hIgG4HC-Flex-v1-m.tbRv1980-f4-m.tbRv0288-f2-m.tbAg85BDel41; Lane 3. mAnti-DCIR_{—}9E8-hIgG4-C-Flex-v1-m.tbRv1980-f4-m.tbRv0288-f2-m.tbAg85BDel41; Lane 4. hIgG4-Flex-v1-m.tbAg85BDel41-f2-m.tbESAT6-f4-m.tbRv1980; Lane 5. manti-CD40_{—}12E12-hIgG4-C-Flex-v1-m.tbAg85BDel41-f2-m.tbESAT6-f4-m.tbRv1980; Lane 6. mAnti-DCIR_{—}9E8-hIgG4-C-Flex-v1-m.tbAg85BDel41-f2-m.tbESAT6-f4-m.tbRv1980; Lane 7. manti-CD40_{—}12E12-hIgG4-C-Flex-v1-m.tbCFP10-f2-m.tbESAT6; Lane 8. hIgG4-Flex-v1-m.tbCFP10-f2-m.tbESAT6; Lane 9. mAnti-DCIR_{—}9E8-hIgG4-C-Flex-v1-m.tbCFP10-f2-m.tbESAT6; Lane 10. mAnti-DCIR_{—}9E8-hIgG4-C-Flex-v1-m.tbHspX. The sequences for each of these constructs is detailed hereinbelow.

C2092: rAB-cetHS-puro [mAnti-DCIR_9E8_H-LV-hIgG4H-C-Flex-v1-m.tbAg85BDel41
(bold) - f2-m.tbESAT6 (underlined)-f4-m.tbRv1980 (italics)]
(SEQ ID NO: 136)
ATGAACAGGCTTACTTCCTCATTGCTGCTGCTGATTGTCCCTGCATATGTCCTGTCCCAGGTTAC
TCTGAAAGAGTCTGGCCCTGGGATATTGCAGCCCTCCCAGACCCTCAGTCTGACTTGTTCTTTC
TCTGGGTTTTCACTGAGCACTTCTGGTATGGGTCTGAGCTGGATTCGTCAGCCTTCAGGAAAGG
GTCTGGAGTGGCTGGCACACATTTACTGGGATGATGACAAGCGCTATAACCCATCCCTGAAGA
GCCGGCTCACAATCTCCAAGGATACCTCCAGCAACCAGGTTTTCCTCAAGATCACCATTGTGG
ACACTGCAGATGCTGCCACATACTACTGTGCTCGAAGCTCCCATTACTACGGTTATGGCTACGG
GGGATACTTCGATGTCTGGGGCGCAGGGACCACGGTCACCGTCTCCTCAGCCAAAACGAAGGG
CCCATCCGTCTTCCCCCTGGCGCCCTGCTCCAGGAGCACCTCCGAGAGCACAGCCGCCCTGGG
CTGCCTGGTCAAGGACTACTTCCCCGAACCGGTGACGGTGTCGTGGAACTCAGGCGCCCTGAC
CAGCGGCGTGCACACCTTCCCGGCTGTCCTACAGTCCTCAGGACTCTACTCCCTCAGCAGCGTG
GTGACCGTGCCCTCCAGCAGCTTGGGCACGAAGACCTACACCTGCAACGTAGATCACAAGCCC
AGCAACACCAAGGTGGACAAGAGAGTTGAGTCCAAATATGGTCCCCCATGCCCACCCTGCCCA
GCACCTGAGTTCGAAGGGGGACCATCAGTCTTCCTGTTCCCCCCAAAACCCAAGGACACTCTC
ATGATCTCCCGGACCCCTGAGGTCACGTGCGTGGTGGTGGACGTGAGCCAGGAAGACCCCGAG
GTCCAGTTCAACTGGTACGTGGATGGCGTGGAGGTGCATAATGCCAAGACAAAGCCGCGGGA
GGAGCAGTTCAACAGCACGTACCGTGTGGTCAGCGTCCTCACCGTCCTGCACCAGGACTGGCT
GAACGGCAAGGAGTACAAGTGCAAGGTCTCCAACAAAGGCCTCCCGTCCTCCATCGAGAAAA
CCATCTCCAAAGCCAAAGGGCAGCCCCGAGAGCCACAGGTGTACACCCTGCCCCCATCCCAGG
AGGAGATGACCAAGAACCAGGTCAGCCTGACCTGCCTGGTCAAAGGCTTCTACCCCAGCGACA
TCGCCGTGGAGTGGGAGAGCAATGGGCAGCCGGAGAACAACTACAAGACCACGCCTCCCGTG
CTGGACTCCGACGGCTCCTTCTTCCTCTACAGCAGGCTAACCGTGGACAAGAGCAGGTGGCAG
GAGGGGAATGTCTTCTCATGCTCCGTGATGCATGAGGCTCTGCACAACCACTACACACAGAAG
AGCCTCTCCCTGTCTCTGGGTAAAGCTAGTCAGACCCCCACCAACACCATCAGCGTGACCCCC
ACCAACAACAGCACCCCCACCAACAACAGCAACCCCAAGCCCAACCCCGCTAGCTCCCGGCCG
GGGCTGCCGGTCGAGTACCTGCAGGTGCCGTCGCCGTCGATGGGCCGCGACATCAAGGTTCAG
TTCCAGAGCGGTGGGAACAACTCACCTGCGGTTTATCTGCTCGACGGCCTGCGCGCCCAAGAC
GACTACAACGGCTGGGATATCAACACCCCGGCGTTCGAGTGGTACTACCAGTCGGGACTGTCG
ATAGTCATGCCGGTCGGCGGGCAGTCCAGCTTCTACAGCGACTGGTACAGCCCGGCCTGCGGT
AAGGCTGGCTGCCAGACTTACAAGTGGGAAACCTTCCTGACCAGCGAGCTGCCGCAATGGTTG
TCCGCCAACAGGGCCGTGAAGCCCACCGGCAGCGCTGCAATCGGCTTGTCGATGGCCGGCTCG
TCGGCAATGATCTTGGCCGCCTACCACCCCCAGCAGTTCATCTACGCCGGCTCGCTGTCGGCCC
TGCTGGACCCCTCTCAGGGGATGGGGCCTAGCCTGATCGGCCTCGCGATGGGTGACGCCGGCG
GTTACAAGGCCGCAGACATGTGGGGTCCCTCGAGTGACCCGGCATGGGAGCGCAACGACCCTA
CGCAGCAGATCCCCAAGCTGGTCGCAAACAACACCCGGCTATGGGTTTATTGCGGGAACGGCA
CCCCGAACGAGTTGGGCGGTGCCAACATACCCGCCGAGTTCTTGGAGAACTTCGTTCGTAGCA
GCAACCTGAAGTTCCAGGATGCGTACAACGCCGCGGGCGGGCACAACGCCGTGTTCAACTTCC
CGCCCAACGGCACGCACAGCTGGGAGTACTGGGGCGCTCAGCTCAACGCCATGAAGGGTGAC
CTGCAGAGTTCGTTAGGCGCCGGCGAATTCCCCACCAGCACCCCCGCCGACAGCAGCACCATC
ACCCCCACCGCCACCCCCACCGCCACCCCCACCATCAAGGGCACTAGCATGACAGAGCAGCAG
TGGAATTTCGCGGGTATCGAGGCCGCGGCAAGCGCAATCCAGGGAAATGTCACGTCCATTCAT
TCCCTCCTTGACGAGGGGAAGCAGTCCCTGACCAAGCTCGCAGCGGCCTGGGGCGGTAGCGGT
TCGGAGGCGTACCAGGGTGTCCAGCAAAAATGGGACGCCACGGCTACCGAGCTGAACAACGC
GCTGCAGAACCTGGCGCGGACGATCAGCGAAGCCGGTCAGGCAATGGCTTCGACCGAAGGCA
ACGTCACTGGGATGTTCGCAAAGCTTGGCGGCGCGCCTACCAACGGCAGCATCACCGTGGCCG
CCACCGCCCCCACCGTGACCCCCACCGTGAACGCCACCCCCAGCGCCGCCTCTAGCGCCGCGC
CCAAGACCTACTGCGAGGAGTTGAAAGGCACCGATACCGGCCAGGCGTGCCAGATTCAAATGT
CCGACCCGGCCTACAACATCAACATCAGCCTGCCCAGTTACTACCCCGACCAGAAGTCGCTGG
AAAATTACATCGCCCAGACGCGCGACAAGTTCCTCAGCGCGGCCACATCGTCCACTCCACGCG
AAGCCCCCTACGAATTGAATATCACCTCGGCCACATACCAGTCCGCGATACCGCCGCGTGGTA
CGCAGGCCGTGGTGCTCAAGGTCTACCAGAACGCCGGCGGCACGCACCCAACGACCACGTAC
AAGGCCTTCGATTGGGACCAGGCCTATCGCAAGCCAATCACCTATGACACGCTGTGGCAGGCT
GACACCGATCCGCTGCCAGTCGTCTTCCCCATTGTGCAAGGTGAACTGAGCAAGCAGACCGGA
CAACAGGTATCGATAGCGCCGAATGCCGGCTTGGACCCGGTGAATTATCAGAACTTCGCAGTC
ACGAACGACGGGGTGATTTTCTTCTTCAACCCGGGGGAGTTGCTGCCCGAAGCAGCCGGCCCA
ACCCAGGTATTGGTCCCACGTTCCGCGATCGACTCGATGCTGGCCGAATTCTAGGCGGCCG
Protein sequence PAB2008 - rAB-cetHS-puro [mAnti-DCIR_9E8_H-LV-hIgG4H-C-Flex-v1-
m.tbAg85BDel41 (bold)-f2-m.tbESAT6 (underlined)-f4-m.tbRv1980 (italics)]
(SEQ ID NO: 137)
QVTLKESGPGILQPSQTLSLTCSFSGFSLSTSGMGLSWIRQPSGKGLEWLAHIYWDDDKRYNPSLKS
RLTISKDTSSNQVFLKITIVDTADAATYYCARSSHYYGYGYGGYFDVWGAGTTVTVSSAKTKGPS
VFPLAPCSRSTSESTAALGCLVKDYFPEPVTVSWNSGALTSGVHTFPAVLQSSGLYSLSSVVTVPSS
SLGTKTYTCNVDHKPSNTKVDKRVESKYGPPCPPCPAPEFEGGPSVFLFPPKPKDTLMISRTPEVTC
VVVDVSQEDPEVQFNWYVDGVEVHNAKTKPREEQFNSTYRVVSVLTVLHQDWLNGKEYKCKVS
NKGLPSSIEKTISKAKGQPREPQVYTLPPSQEEMTKNQVSLTCLVKGFYPSDIAVEWESNGQPENNY
KTTPPVLDSDGSFFLYSRLTVDKSRWQEGNVFSCSVMHEALHNHYTQKSLSLSLGKASQTPTNTIS
VTPTNNSTPTNNSNPKPNPASSRPGLPVEYLQVPSPSMGRDIKVQFQSGGNNSPAVYLLDGLRA
QDDYNGWDINTPAFEWYYQSGLSIVMPVGGQSSFYSDWYSPACGKAGCQTYKWETFLTSEL
PQWLSANRAVKPTGSAAIGLSMAGSSAMILAAYHPQQFIYAGSLSALLDPSQGMGPSLIGLAM
GDAGGYKAADMWGPSSDPAWERNDPTQQIPKLVANNTRLWVYCGNGTPNELGGANIPAEFL
ENFVRSSNLKFQDAYNAAGGHNAVFNFPPNGTHSWEYWGAQLNAMKGDLQSSLGAGEFPTS
TPADSSTITPTATPTATPTIKGTSMTEQQWNFAGIEAAASAIQGNVTSIHSLLDEGKQSLTKLAAA
WGGSGSEAYQGVQQKWDATATELNNALQNLARTISEAGQAMASTEGNVTGMFAKLGGAPT
NGSITVAATAPTVTPTVNATPSAASS

[symbol]

[symbol]

[symbol]

[symbol]

[symbol]

[symbol]

[symbol]

[symbol]

[symbol]

EF
C2091: rAB-cetHS-puro[mAnti-DCIR_9E8_H-LV-hIgG4H-C-Flex-v1-m.tbRv1980 (M. tb.
antigen - bold)-f4-m.tbRv0288 (M. tb. - antigen - underlined)-f2-m.tbAg85BDel41
(M. tb. Antigen - italics]
(SEQ ID NO: 138)
ATGAACAGGCTTACTTCCTCATTGCTGCTGCTGATTGTCCCTGCATATGTCCTGTCCCAG
GTTACTCTGAAAGAGTCTGGCCCTGGGATATTGCAGCCCTCCCAGACCCTCAGTCTGACTTGTT
CTTTCTCTGGGTTTTCACTGAGCACTTCTGGTATGGGTCTGAGCTGGATTCGTCAGCCTTCAGG
AAAGGGTCTGGAGTGGCTGGCACACATTTACTGGGATGATGACAAGCGCTATAACCCATCCCT
GAAGAGCCGGCTCACAATCTCCAAGGATACCTCCAGCAACCAGGTTTTCCTCAAGATCACCAT
TGTGGACACTGCAGATGCTGCCACATACTACTGTGCTCGAAGCTCCCATTACTACGGTTATGGC
TACGGGGGATACTTCGATGTCTGGGGCGCAGGGACCACGGTCACCGTCTCCTCAGCCAAAACG
AAGGGCCCATCCGTCTTCCCCCTGGCGCCCTGCTCCAGGAGCACCTCCGAGAGCACAGCCGCC
CTGGGCTGCCTGGTCAAGGACTACTTCCCCGAACCGGTGACGGTGTCGTGGAACTCAGGCGCC
CTGACCAGCGGCGTGCACACCTTCCCGGCTGTCCTACAGTCCTCAGGACTCTACTCCCTCAGCA
GCGTGGTGACCGTGCCCTCCAGCAGCTTGGGCACGAAGACCTACACCTGCAACGTAGATCACA
AGCCCAGCAACACCAAGGTGGACAAGAGAGTTGAGTCCAAATATGGTCCCCCATGCCCACCCT
GCCCAGCACCTGAGTTCGAAGGGGGACCATCAGTCTTCCTGTTCCCCCCAAAACCCAAGGACA
CTCTCATGATCTCCCGGACCCCTGAGGTCACGTGCGTGGTGGTGGACGTGAGCCAGGAAGACC
CCGAGGTCCAGTTCAACTGGTACGTGGATGGCGTGGAGGTGCATAATGCCAAGACAAAGCCGC
GGGAGGAGCAGTTCAACAGCACGTACCGTGTGGTCAGCGTCCTCACCGTCCTGCACCAGGACT
GGCTGAACGGCAAGGAGTACAAGTGCAAGGTCTCCAACAAAGGCCTCCCGTCCTCCATCGAGA
AAACCATCTCCAAAGCCAAAGGGCAGCCCCGAGAGCCACAGGTGTACACCCTGCCCCCATCCC
AGGAGGAGATGACCAAGAACCAGGTCAGCCTGACCTGCCTGGTCAAAGGCTTCTACCCCAGCG
ACATCGCCGTGGAGTGGGAGAGCAATGGGCAGCCGGAGAACAACTACAAGACCACGCCTCCC
GTGCTGGACTCCGACGGCTCCTTCTTCCTCTACAGCAGGCTAACCGTGGACAAGAGCAGGTGG
CAGGAGGGGAATGTCTTCTCATGCTCCGTGATGCATGAGGCTCTGCACAACCACTACACACAG
AAGAGCCTCTCCCTGTCTCTGGGTAAAGCTAGTCAGACCCCCACCAACACCATCAGCGTGACC
CCCACCAACAACAGCACCCCCACCAACAACAGCAACCCCAAGCCCAACCCCGCTAGCGCCGC
GCCCAAGACCTACTGCGAGGAGTTGAAAGGCACCGATACCGGCCAGGCGTGCCAGATTCAAA
TGTCCGACCCGGCCTACAACATCAACATCAGCCTGCCCAGTTACTACCCCGACCAGAAGTCGC
TGGAAAATTACATCGCCCAGACGCGCGACAAGTTCCTCAGCGCGGCCACATCGTCCACTCCAC
GCGAAGCCCCCTACGAATTGAATATCACCTCGGCCACATACCAGTCCGCGATACCGCCGCGTG
GTACGCAGGCCGTGGTGCTCAAGGTCTACCAGAACGCCGGCGGCACGCACCCAACGACCACGT
ACAAGGCCTTCGATTGGGACCAGGCCTATCGCAAGCCAATCACCTATGACACGCTGTGGCAGG
CTGACACCGATCCGCTGCCAGTCGTCTTCCCCATTGTGCAAGGTGAACTGAGCAAGCAGACCG
GACAACAGGTATCGATAGCGCCGAATGCCGGCTTGGACCCGGTGAATTATCAGAACTTCGCAG
TCACGAACGACGGGGTGATTTTCTTCTTCAACCCGGGGGAGTTGCTGCCCGAAGCAGCCGGCC
CAACCCAGGTATTGGTCCCACGTTCCGCGATCGACTCGATGCTGGCCAAGCTTGGCGGCGCGC
CTACCAACGGCAGCATCACCGTGGCCGCCACCGCCCCCACCGTGACCCCCACCGTGAACGCCA
CCCCCAGCGCCGCCTCTAGCATGTCGCAAATCATGTACAACTACCCCGCGATGTTGGGTCACG
CCGGGGATATGGCCGGATATGCCGGCACGCTGCAGAGCTTGGGTGCCGAGATCGCCGTGGAGC
AGGCCGCGTTGCAGAGTGCGTGGCAGGGCGATACCGGGATCACGTATCAGGCGTGGCAGGCA
CAGTGGAACCAGGCCATGGAAGATTTGGTGCGGGCCTATCATGCGATGTCCAGCACCCATGAA
GCCAACACCATGGCGATGATGGCCCGCGACACGGCCGAAGCCGCCAAATGGGGCGGCGAATT
CCCCACCAGCACCCCCGCCGACAGCAGCACCATCACCCCCACCGCCACCCCCACCGCCACCCC
CACCATCAAGGGCACTAGCTCCCGGCCGGGGCTGCCGGTCGAGTACCTGCAGGTGCCGTCGCC
GTCGATGGGCCGCGACATCAAGGTTCAGTTCCAGAGCGGTGGGAACAACTCACCTGCGGTTTA
TCTGCTCGACGGCCTGCGCGCCCAAGACGACTACAACGGCTGGGATATCAACACCCCGGCGTT
CGAGTGGTACTACCAGTCGGGACTGTCGATAGTCATGCCGGTCGGCGGGCAGTCCAGCTTCTA
CAGCGACTGGTACAGCCCGGCCTGCGGTAAGGCTGGCTGCCAGACTTACAAGTGGGAAACCTT
CCTGACCAGCGAGCTGCCGCAATGGTTGTCCGCCAACAGGGCCGTGAAGCCCACCGGCAGCGC
TGCAATCGGCTTGTCGATGGCCGGCTCGTCGGCAATGATCTTGGCCGCCTACCACCCCCAGCA
GTTCATCTACGCCGGCTCGCTGTCGGCCCTGCTGGACCCCTCTCAGGGGATGGGGCCTAGCCTG
ATCGGCCTCGCGATGGGTGACGCCGGCGGTTACAAGGCCGCAGACATGTGGGGTCCCTCGAGT
GACCCGGCATGGGAGCGCAACGACCCTACGCAGCAGATCCCCAAGCTGGTCGCAAACAACAC
CCGGCTATGGGTTTATTGCGGGAACGGCACCCCGAACGAGTTGGGCGGTGCCAACATACCCGC
CGAGTTCTTGGAGAACTTCGTTCGTAGCAGCAACCTGAAGTTCCAGGATGCGTACAACGCCGC
GGGCGGGCACAACGCCGTGTTCAACTTCCCGCCCAACGGCACGCACAGCTGGGAGTACTGGGG
CGCTCAGCTCAACGCCATGAAGGGTGACCTGCAGAGTTCGTTAGGCGCCGGCTGAGCGGCCG
Protein sequence PAB2059 - rAB-cetHS-puro[mAnti-DCIR_9E8_H-LV-hIgG4H-C-Flex-v1-
m.tbRv1980 (M. tb. antigen - bold)-f4-m.tbRv0288 (M. tb. - antigen - underlined)-
f2-m.tbAg85BDel41 (M. tb. Antigen - italics]
(SEQ ID NO: 139)
QVTLKESGPGILQPSQTLSLTCSFSGFSLSTSGMGLSWIRQPSGKGLEWLAHIYWDDDKRY
NPSLKSRLTISKDTSSNQVFLKITIVDTADAATYYCARSSHYYGYGYGGYFDVWGAGTTVTVSSAK
TKGPSVFPLAPCSRSTSESTAALGCLVKDYFPEPVTVSWNSGALTSGVHTFPAVLQSSGLYSLSSVV
TVPSSSLGTKTYTCNVDHKPSNTKVDKRVESKYGPPCPPCPAPEFEGGPSVFLFPPKPKDTLMISRTP
EVTCVVVDVSQEDPEVQFNWYVDGVEVHNAKTKPREEQFNSTYRVVSVLTVLHQDWLNGKEYK
CKVSNKGLPSSIEKTISKAKGQPREPQVYTLPPSQEEMTKNQVSLTCLVKGFYPSDIAVEWESNGQP
ENNYKTTPPVLDSDGSFFLYSRLTVDKSRWQEGNVFSCSVMHEALHNHYTQKSLSLSLGKASQTPT
NTISVTPTNNSTPTNNSNPKPNPASAAPKTYCEELKGTDTGQACQIQMSDPAYNINISLPSYYPD
QKSLENYIAQTRDKFLSAATSSTPREAPYELNITSATYQSAIPPRGTQAVVLKVYQNAGGTHPT
TTYKAFDWDQAYRKPITYDTLWQADTDPLPVVFPIVQGELSKQTGQQVSIAPNAGLDPVNYQ
NFAVTNDGVIFFFNPGELLPEAAGPTQVLVPRSAIDSMLAKLGGAPTNGSITVAATAPTVTPTVN
ATPSAASSMSQIMYNYPAMLGHAGDMAGYAGTLQSLGAEIAVEQAALQSAWQGDTGITYQAWQ
AQWNQAMEDLVRAYHAMSSTHEANTMAMMARDTAEAAKWGGEFPTSTPADSSTITPTATPTATP
TIKGTSSRPGLPVEYLQVPSPSMGRDIKVQFQSGGNNSPAVYLLDGLRAQDDYNGWDINTPAFEWYYQS
GLSIVMPVGGQSSFYSDWYSPACGKAGCQTYKWETFLTSELPQWLSANRAVKPTGSAAIGLSMAGSSAMI
LAAYHPQQFIYAGSLSALLDPSQGMGPSLIGLAMGDAGGYKAADMWGPSSDPAWERNDPTQQIPKLVA
NNTRLWVYCGNGTPNELGGANIPAEFLENFVRSSNLKFQDAYNAAGGHNAVFNFPPNGTHSWEYWGAQ
LNAMKGDLQSSLGAG
C2088: rAB-cetHS-puro[hIgG4H-Flex-v1-m.tbAg85BDel41 (M. tb. Antigen - bold) -f2-
m.tbESAT6 (M. tb. Antigen - underlined)-f4-m.tbRv1980 (M. tb. Antigen - italics)]
(SEQ ID NO: 140)
ATGGACCTCCTGTGCAAGAACATGAAGCACCTGTGGTTCTTCCTCCTGCTGGTGGCGGC
TCCCAGATGGGTCCTGTCCCGGCTGCAGCTGCAGGAGTCGGGCCCAGGCCTGCTGAAGCCTTC
GGTGACCCTGTCCCTCACCTGCACTGTCTCGGGTGACTCCGTCGCCAGTAGTTCTTATTACTGG
GGCTGGGTCCGTCAGCCCCCAGGGAAGGGACTCGAGTGGATAGGGACTATCAATTTTAGTGGC
AATATGTATTATAGTCCGTCCCTCAGGAGTCGAGTGACCATGTCGGCAGACATGTCCGAGAAC
TCCTTCTATCTGAAATTGGACTCTGTGACCGCAGCAGACACGGCCGTCTATTATTGTGCGGCAG
GACACCTCGTTATGGGATTTGGGGCCCACTGGGGACAGGGAAAACTGGTCTCCGTCTCTCCAG
CTTCCACCAAGGGCCCATCCGTCTTCCCCCTGGCGCCCTGCTCCAGGAGCACCTCCGAGAGCAC
AGCCGCCCTGGGCTGCCTGGTCAAGGACTACTTCCCCGAACCGGTGACGGTGTCGTGGAACTC
AGGCGCCCTGACCAGCGGCGTGCACACCTTCCCGGCTGTCCTACAGTCCTCAGGACTCTACTCC
CTCAGCAGCGTGGTGACCGTGCCCTCCAGCAGCTTGGGCACGAAGACCTACACCTGCAACGTA
GATCACAAGCCCAGCAACACCAAGGTGGACAAGAGAGTTGAGTCCAAATATGGTCCCCCATG
CCCACCCTGCCCAGCACCTGAGTTCGAAGGGGGACCATCAGTCTTCCTGTTCCCCCCAAAACCC
AAGGACACTCTCATGATCTCCCGGACCCCTGAGGTCACGTGCGTGGTGGTGGACGTGAGCCAG
GAAGACCCCGAGGTCCAGTTCAACTGGTACGTGGATGGCGTGGAGGTGCATAATGCCAAGAC
AAAGCCGCGGGAGGAGCAGTTCAACAGCACGTACCGTGTGGTCAGCGTCCTCACCGTCCTGCA
CCAGGACTGGCTGAACGGCAAGGAGTACAAGTGCAAGGTCTCCAACAAAGGCCTCCCGTCCTC
CATCGAGAAAACCATCTCCAAAGCCAAAGGGCAGCCCCGAGAGCCACAGGTGTACACCCTGC
CCCCATCCCAGGAGGAGATGACCAAGAACCAGGTCAGCCTGACCTGCCTGGTCAAAGGCTTCT
ACCCCAGCGACATCGCCGTGGAGTGGGAGAGCAATGGGCAGCCGGAGAACAACTACAAGACC
ACGCCTCCCGTGCTGGACTCCGACGGCTCCTTCTTCCTCTACAGCAGGCTAACCGTGGACAAGA
GCAGGTGGCAGGAGGGGAATGTCTTCTCATGCTCCGTGATGCATGAGGCTCTGCACAACCACT
ACACACAGAAGAGCCTCTCCCTGTCTCTGGGTAAAGCTAGTCAGACCCCCACCAACACCATCA
GCGTGACCCCCACCAACAACAGCACCCCCACCAACAACAGCAACCCCAAGCCCAACCCCGCTA
GCTCCCGGCCGGGGCTGCCGGTCGAGTACCTGCAGGTGCCGTCGCCGTCGATGGGCCGCGACA
TCAAGGTTCAGTTCCAGAGCGGTGGGAACAACTCACCTGCGGTTTATCTGCTCGACGGCCTGC
GCGCCCAAGACGACTACAACGGCTGGGATATCAACACCCCGGCGTTCGAGTGGTACTACCAGT
CGGGACTGTCGATAGTCATGCCGGTCGGCGGGCAGTCCAGCTTCTACAGCGACTGGTACAGCC
CGGCCTGCGGTAAGGCTGGCTGCCAGACTTACAAGTGGGAAACCTTCCTGACCAGCGAGCTGC
CGCAATGGTTGTCCGCCAACAGGGCCGTGAAGCCCACCGGCAGCGCTGCAATCGGCTTGTCGA
TGGCCGGCTCGTCGGCAATGATCTTGGCCGCCTACCACCCCCAGCAGTTCATCTACGCCGGCTC
GCTGTCGGCCCTGCTGGACCCCTCTCAGGGGATGGGGCCTAGCCTGATCGGCCTCGCGATGGG
TGACGCCGGCGGTTACAAGGCCGCAGACATGTGGGGTCCCTCGAGTGACCCGGCATGGGAGC
GCAACGACCCTACGCAGCAGATCCCCAAGCTGGTCGCAAACAACACCCGGCTATGGGTTTATT
GCGGGAACGGCACCCCGAACGAGTTGGGCGGTGCCAACATACCCGCCGAGTTCTTGGAGAACT
TCGTTCGTAGCAGCAACCTGAAGTTCCAGGATGCGTACAACGCCGCGGGCGGGCACAACGCCG
TGTTCAACTTCCCGCCCAACGGCACGCACAGCTGGGAGTACTGGGGCGCTCAGCTCAACGCCA
TGAAGGGTGACCTGCAGAGTTCGTTAGGCGCCGGCGAATTCCCCACCAGCACCCCCGCCGACA
GCAGCACCATCACCCCCACCGCCACCCCCACCGCCACCCCCACCATCAAGGGCACTAGCATGA
CAGAGCAGCAGTGGAATTTCGCGGGTATCGAGGCCGCGGCAAGCGCAATCCAGGGAAATGTC
ACGTCCATTCATTCCCTCCTTGACGAGGGGAAGCAGTCCCTGACCAAGCTCGCAGCGGCCTGG
GGCGGTAGCGGTTCGGAGGCGTACCAGGGTGTCCAGCAAAAATGGGACGCCACGGCTACCGA
GCTGAACAACGCGCTGCAGAACCTGGCGCGGACGATCAGCGAAGCCGGTCAGGCAATGGCTT
CGACCGAAGGCAACGTCACTGGGATGTTCGCAAAGCTTGGCGGCGCGCCTACCAACGGCAGC
ATCACCGTGGCCGCCACCGCCCCCACCGTGACCCCCACCGTGAACGCCACCCCCAGCGCCGCC
TCTAGCGCCGCGCCCAAGACCTACTGCGAGGAGTTGAAAGGCACCGATACCGGCCAGGCGTGC
CAGATTCAAATGTCCGACCCGGCCTACAACATCAACATCAGCCTGCCCAGTTACTACCCCGAC
CAGAAGTCGCTGGAAAATTACATCGCCCAGACGCGCGACAAGTTCCTCAGCGCGGCCACATCG
TCCACTCCACGCGAAGCCCCCTACGAATTGAATATCACCTCGGCCACATACCAGTCCGCGATA
CCGCCGCGTGGTACGCAGGCCGTGGTGCTCAAGGTCTACCAGAACGCCGGCGGCACGCACCCA
ACGACCACGTACAAGGCCTTCGATTGGGACCAGGCCTATCGCAAGCCAATCACCTATGACACG
CTGTGGCAGGCTGACACCGATCCGCTGCCAGTCGTCTTCCCCATTGTGCAAGGTGAACTGAGC
AAGCAGACCGGACAACAGGTATCGATAGCGCCGAATGCCGGCTTGGACCCGGTGAATTATCA
GAACTTCGCAGTCACGAACGACGGGGTGATTTTCTTCTTCAACCCGGGGGAGTTGCTGCCCGA
AGCAGCCGGCCCAACCCAGGTATTGGTCCCACGTTCCGCGATCGACTCGATGCTGGCCGAATT
CTAGGCGGCCGCG
Protein sequence PAB 2032- rAB-cetHS-puro[hIgG4H-Flex-v1-m.tbAg85BDel41 (M. tb.
Antigen - bold) -f2-m.tbESAT6 (M. tb. Antigen - underlined) -f4-m.tbRv1980
(M. tb. Antigen - italics)]
(SEQ ID NO: 141)
RLQLQESGPGLLKPSVTLSLTCTVSGDSVASSSYYWGWVRQPPGKGLEWIGTINFSGNMYY
SPSLRSRVTMSADMSENSFYLKLDSVTAADTAVYYCAAGHLVMGFGAHWGQGKLVSVSPASTKG
PSVFPLAPCSRSTSESTAALGCLVKDYFPEPVTVSWNSGALTSGVHTFPAVLQSSGLYSLSSVVTVP
SSSLGTKTYTCNVDHKPSNTKVDKRVESKYGPPCPPCPAPEFEGGPSVFLFPPKPKDTLMISRTPEVT
CVVVDVSQEDPEVQFNWYVDGVEVHNAKTKPREEQFNSTYRVVSVLTVLHQDWLNGKEYKCKV
SNKGLPSSIEKTISKAKGQPREPQVYTLPPSQEEMTKNQVSLTCLVKGFYPSDIAVEWESNGQPENN
YKTTPPVLDSDGSFFLYSRLTVDKSRWQEGNVFSCSVMHEALHNHYTQKSLSLSLGKASQTPTNTI
SVTPTNNSTPTNNSNPKPNPASSRPGLPVEYLQVPSPSMGRDIKVQFQSGGNNSPAVYLLDGLR
AQDDYNGWDINTPAFEWYYQSGLSIVMPVGGQSSFYSDWYSPACGKAGCQTYKWETFLTSE
LPQWLSANRAVKPTGSAAIGLSMAGSSAMILAAYHPQQFIYAGSLSALLDPSQGMGPSLIGLA
MGDAGGYKAADMWGPSSDPAWERNDPTQQIPKLVANNTRLWVYCGNGTPNELGGANIPAE
FLENFVRSSNLKFQDAYNAAGGHNAVFNFPPNGTHSWEYWGAQLNAMKGDLQSSLGAGEFP
TSTPADSSTITPTATPTATPTIKGTSMTEQQWNFAGIEAAASAIQGNVTSIHSLLDEGKQSLTKLAAA
WGGSGSEAYQGVQQKWDATATELNNALQNLARTISEAGQAMASTEGNVTGMFAKLGGAPTNGSI
TVAATAPTVTPTVNATPSAASSAAPKTYCEELKGTDTGQACQIQMSDPAYNINISLPSYYPDQKSLENYI
AQTRDKFLSAATSSTPREAPYELNITSATYQSAIPPRGTQAVVLKVYQNAGGTHPTTTYKAFDWDQAYRKP
ITYDTLWQADTDPLPVVFPIVQGELSKQTGQQVSIAPNAGLDPVNYQNFAVTNDGVIFFFNPGELLPEAA
GPTQVLVPRSAIDSMLAEF
C2087: rAB-cetHS-puro[hIgG4H-Flex-v1-m.tbRv1980 (M. tb. antigen - bold)-f4-
m.tbRv0288 (M. tb. antigen - underlined)-f2-m.tbAg85BDel41 (M. tb. antigen -
italics)]
(SEQ ID NO: 142)
ATGGACCTCCTGTGCAAGAACATGAAGCACCTGTGGTTCTTCCTCCTGCTGGTGGCGGC
TCCCAGATGGGTCCTGTCCCGGCTGCAGCTGCAGGAGTCGGGCCCAGGCCTGCTGAAGCCTTC
GGTGACCCTGTCCCTCACCTGCACTGTCTCGGGTGACTCCGTCGCCAGTAGTTCTTATTACTGG
GGCTGGGTCCGTCAGCCCCCAGGGAAGGGACTCGAGTGGATAGGGACTATCAATTTTAGTGGC
AATATGTATTATAGTCCGTCCCTCAGGAGTCGAGTGACCATGTCGGCAGACATGTCCGAGAAC
TCCTTCTATCTGAAATTGGACTCTGTGACCGCAGCAGACACGGCCGTCTATTATTGTGCGGCAG
GACACCTCGTTATGGGATTTGGGGCCCACTGGGGACAGGGAAAACTGGTCTCCGTCTCTCCAG
CTTCCACCAAGGGCCCATCCGTCTTCCCCCTGGCGCCCTGCTCCAGGAGCACCTCCGAGAGCAC
AGCCGCCCTGGGCTGCCTGGTCAAGGACTACTTCCCCGAACCGGTGACGGTGTCGTGGAACTC
AGGCGCCCTGACCAGCGGCGTGCACACCTTCCCGGCTGTCCTACAGTCCTCAGGACTCTACTCC
CTCAGCAGCGTGGTGACCGTGCCCTCCAGCAGCTTGGGCACGAAGACCTACACCTGCAACGTA
GATCACAAGCCCAGCAACACCAAGGTGGACAAGAGAGTTGAGTCCAAATATGGTCCCCCATG
CCCACCCTGCCCAGCACCTGAGTTCGAAGGGGGACCATCAGTCTTCCTGTTCCCCCCAAAACCC
AAGGACACTCTCATGATCTCCCGGACCCCTGAGGTCACGTGCGTGGTGGTGGACGTGAGCCAG
GAAGACCCCGAGGTCCAGTTCAACTGGTACGTGGATGGCGTGGAGGTGCATAATGCCAAGAC
AAAGCCGCGGGAGGAGCAGTTCAACAGCACGTACCGTGTGGTCAGCGTCCTCACCGTCCTGCA
CCAGGACTGGCTGAACGGCAAGGAGTACAAGTGCAAGGTCTCCAACAAAGGCCTCCCGTCCTC
CATCGAGAAAACCATCTCCAAAGCCAAAGGGCAGCCCCGAGAGCCACAGGTGTACACCCTGC
CCCCATCCCAGGAGGAGATGACCAAGAACCAGGTCAGCCTGACCTGCCTGGTCAAAGGCTTCT
ACCCCAGCGACATCGCCGTGGAGTGGGAGAGCAATGGGCAGCCGGAGAACAACTACAAGACC
ACGCCTCCCGTGCTGGACTCCGACGGCTCCTTCTTCCTCTACAGCAGGCTAACCGTGGACAAGA
GCAGGTGGCAGGAGGGGAATGTCTTCTCATGCTCCGTGATGCATGAGGCTCTGCACAACCACT
ACACACAGAAGAGCCTCTCCCTGTCTCTGGGTAAAGCTAGTCAGACCCCCACCAACACCATCA
GCGTGACCCCCACCAACAACAGCACCCCCACCAACAACAGCAACCCCAAGCCCAACCCCGCTA
GCGCCGCGCCCAAGACCTACTGCGAGGAGTTGAAAGGCACCGATACCGGCCAGGCGTGCCAG
ATTCAAATGTCCGACCCGGCCTACAACATCAACATCAGCCTGCCCAGTTACTACCCCGACCAG
AAGTCGCTGGAAAATTACATCGCCCAGACGCGCGACAAGTTCCTCAGCGCGGCCACATCGTCC
ACTCCACGCGAAGCCCCCTACGAATTGAATATCACCTCGGCCACATACCAGTCCGCGATACCG
CCGCGTGGTACGCAGGCCGTGGTGCTCAAGGTCTACCAGAACGCCGGCGGCACGCACCCAACG
ACCACGTACAAGGCCTTCGATTGGGACCAGGCCTATCGCAAGCCAATCACCTATGACACGCTG
TGGCAGGCTGACACCGATCCGCTGCCAGTCGTCTTCCCCATTGTGCAAGGTGAACTGAGCAAG
CAGACCGGACAACAGGTATCGATAGCGCCGAATGCCGGCTTGGACCCGGTGAATTATCAGAAC
TTCGCAGTCACGAACGACGGGGTGATTTTCTTCTTCAACCCGGGGGAGTTGCTGCCCGAAGCA
GCCGGCCCAACCCAGGTATTGGTCCCACGTTCCGCGATCGACTCGATGCTGGCCAAGCTTGGC
GGCGCGCCTACCAACGGCAGCATCACCGTGGCCGCCACCGCCCCCACCGTGACCCCCACCGTG
AACGCCACCCCCAGCGCCGCCTCTAGCATGTCGCAAATCATGTACAACTACCCCGCGATGTTG
GGTCACGCCGGGGATATGGCCGGATATGCCGGCACGCTGCAGAGCTTGGGTGCCGAGATCGCC
GTGGAGCAGGCCGCGTTGCAGAGTGCGTGGCAGGGCGATACCGGGATCACGTATCAGGCGTG
GCAGGCACAGTGGAACCAGGCCATGGAAGATTTGGTGCGGGCCTATCATGCGATGTCCAGCAC
CCATGAAGCCAACACCATGGCGATGATGGCCCGCGACACGGCCGAAGCCGCCAAATGGGGCG
GCGAATTCCCCACCAGCACCCCCGCCGACAGCAGCACCATCACCCCCACCGCCACCCCCACCG
CCACCCCCACCATCAAGGGCACTAGCTCCCGGCCGGGGCTGCCGGTCGAGTACCTGCAGGTGC
CGTCGCCGTCGATGGGCCGCGACATCAAGGTTCAGTTCCAGAGCGGTGGGAACAACTCACCTG
CGGTTTATCTGCTCGACGGCCTGCGCGCCCAAGACGACTACAACGGCTGGGATATCAACACCC
CGGCGTTCGAGTGGTACTACCAGTCGGGACTGTCGATAGTCATGCCGGTCGGCGGGCAGTCCA
GCTTCTACAGCGACTGGTACAGCCCGGCCTGCGGTAAGGCTGGCTGCCAGACTTACAAGTGGG
AAACCTTCCTGACCAGCGAGCTGCCGCAATGGTTGTCCGCCAACAGGGCCGTGAAGCCCACCG
GCAGCGCTGCAATCGGCTTGTCGATGGCCGGCTCGTCGGCAATGATCTTGGCCGCCTACCACC
CCCAGCAGTTCATCTACGCCGGCTCGCTGTCGGCCCTGCTGGACCCCTCTCAGGGGATGGGGC
CTAGCCTGATCGGCCTCGCGATGGGTGACGCCGGCGGTTACAAGGCCGCAGACATGTGGGGTC
CCTCGAGTGACCCGGCATGGGAGCGCAACGACCCTACGCAGCAGATCCCCAAGCTGGTCGCAA
ACAACACCCGGCTATGGGTTTATTGCGGGAACGGCACCCCGAACGAGTTGGGCGGTGCCAACA
TACCCGCCGAGTTCTTGGAGAACTTCGTTCGTAGCAGCAACCTGAAGTTCCAGGATGCGTACA
ACGCCGCGGGCGGGCACAACGCCGTGTTCAACTTCCCGCCCAACGGCACGCACAGCTGGGAGT
ACTGGGGCGCTCAGCTCAACGCCATGAAGGGTGACCTGCAGAGTTCGTTAGGCGCCGGCTGAG
CGGCCG
Protein sequence PAB2007 - rAB-cetHS-puro[hIgG4H-Flex-v1-m.tbRv1980 (M. tb.
antigen - bold)-f4-m.tbRv0288 (M. tb. antigen - underlined)-f2-m.tbAg85BDel41
(M. tb. antigen - italics)]
(SEQ ID NO: 143)
RLQLQESGPGLLKPSVTLSLTCTVSGDSVASSSYYWGWVRQPPGKGLEWIGTINFSGNMYY
SPSLRSRVTMSADMSENSFYLKLDSVTAADTAVYYCAAGHLVMGFGAHWGQGKLVSVSPASTKG
PSVFPLAPCSRSTSESTAALGCLVKDYFPEPVTVSWNSGALTSGVHTFPAVLQSSGLYSLSSVVTVP
SSSLGTKTYTCNVDHKPSNTKVDKRVESKYGPPCPPCPAPEFEGGPSVFLFPPKPKDTLMISRTPEVT
CVVVDVSQEDPEVQFNWYVDGVEVHNAKTKPREEQFNSTYRVVSVLTVLHQDWLNGKEYKCKV
SNKGLPSSIEKTISKAKGQPREPQVYTLPPSQEEMTKNQVSLTCLVKGFYPSDIAVEWESNGQPENN
YKTTPPVLDSDGSFFLYSRLTVDKSRWQEGNVFSCSVMHEALHNHYTQKSLSLSLGKASQTPTNTI
SVTPTNNSTPTNNSNPKPNPASAAPKTYCEELKGTDTGQACQIQMSDPAYNINISLPSYYPDQKS
LENYIAQTRDKFLSAATSSTPREAPYELNITSATYQSAIPPRGTQAVVLKVYQNAGGTHPTTTY
KAFDWDQAYRKPITYDTLWQADTDPLPVVFPIVQGELSKQTGQQVSIAPNAGLDPVNYQNFA
VTNDGVIFFFNPGELLPEAAGPTQVLVPRSAIDSMLAKLGGAPTNGSITVAATAPTVTPTVNATP
SAASSMSQIMYNYPAMLGHAGDMAGYAGTLQSLGAEIAVEQAALQSAWQGDTGITYQAWQAQ
WNQAMEDLVRAYHAMSSTHEANTMAMMARDTAEAAKWGGEFPTSTPADSSTITPTATPTATPTI
KGTSSRPGLPVEYLQVPSPSMGRDIKVQFQSGGNNSPAVYLLDGLRAQDDYNGWDINTPAFEWYYQSGL
SIVMPVGGQSSFYSDWYSPACGKAGCQTYKWETFLTSELPQWLSANRAVKPTGSAAIGLSMAGSSAMILA
AYHPQQFIYAGSLSALLDPSQGMGPSLIGLAMGDAGGYKAADMWGPSSDPAWERNDPTQQIPKLVANN
TRLWVYCGNGTPNELGGANIPAEFLENFVRSSNLKFQDAYNAAGGHNAVFNFPPNGTHSWEYWGAQLN
AMKGDLQSSLGAG
C2084: rAB-cetHS-puro[manti-CD40_12E12.3F3_H-V-SLAML-hIgG4H-C-Flex-v1-
m.tbAg85BDel41 (M. tb. antigen - bold)-f2-m.tbESAT6 (M. tb. antigen -
underlined)- f4-m.tbRv1980(M. tb. antigen-italics)]
(SEQ ID NO: 144)
ATGGACCCCAAAGGCTCCCTTTCCTGGAGAATACTTCTGTTTCTCTCCCTGGCTTTTGAG
TTGTCGTACGGAGAAGTGAAGCTGGTGGAGTCTGGGGGAGGCTTAGTGCAGCCTGGAGGGTCC
CTGAAACTCTCCTGTGCAACCTCTGGATTCACTTTCAGTGACTATTACATGTATTGGGTTCGCC
AGACTCCAGAGAAGAGGCTGGAGTGGGTCGCATACATTAATTCTGGTGGTGGTAGCACCTATT
ATCCAGACACTGTAAAGGGCCGATTCACCATCTCCAGAGACAATGCCAAGAACACCCTGTACC
TGCAAATGAGCCGGCTGAAGTCTGAGGACACAGCCATGTATTACTGTGCAAGACGGGGGTTAC
CGTTCCATGCTATGGACTATTGGGGTCAAGGAACCTCAGTCACCGTCTCCTCAGCCAAAACGA
AGGGCCCATCCGTCTTCCCCCTGGCGCCCTGCTCCAGGAGCACCTCCGAGAGCACAGCCGCCC
TGGGCTGCCTGGTCAAGGACTACTTCCCCGAACCGGTGACGGTGTCGTGGAACTCAGGCGCCC
TGACCAGCGGCGTGCACACCTTCCCGGCTGTCCTACAGTCCTCAGGACTCTACTCCCTCAGCAG
CGTGGTGACCGTGCCCTCCAGCAGCTTGGGCACGAAGACCTACACCTGCAACGTAGATCACAA
GCCCAGCAACACCAAGGTGGACAAGAGAGTTGAGTCCAAATATGGTCCCCCATGCCCACCCTG
CCCAGCACCTGAGTTCGAAGGGGGACCATCAGTCTTCCTGTTCCCCCCAAAACCCAAGGACAC
TCTCATGATCTCCCGGACCCCTGAGGTCACGTGCGTGGTGGTGGACGTGAGCCAGGAAGACCC
CGAGGTCCAGTTCAACTGGTACGTGGATGGCGTGGAGGTGCATAATGCCAAGACAAAGCCGC
GGGAGGAGCAGTTCAACAGCACGTACCGTGTGGTCAGCGTCCTCACCGTCCTGCACCAGGACT
GGCTGAACGGCAAGGAGTACAAGTGCAAGGTCTCCAACAAAGGCCTCCCGTCCTCCATCGAGA
AAACCATCTCCAAAGCCAAAGGGCAGCCCCGAGAGCCACAGGTGTACACCCTGCCCCCATCCC
AGGAGGAGATGACCAAGAACCAGGTCAGCCTGACCTGCCTGGTCAAAGGCTTCTACCCCAGCG
ACATCGCCGTGGAGTGGGAGAGCAATGGGCAGCCGGAGAACAACTACAAGACCACGCCTCCC
GTGCTGGACTCCGACGGCTCCTTCTTCCTCTACAGCAGGCTAACCGTGGACAAGAGCAGGTGG
CAGGAGGGGAATGTCTTCTCATGCTCCGTGATGCATGAGGCTCTGCACAACCACTACACACAG
AAGAGCCTCTCCCTGTCTCTGGGTAAAGCTAGTCAGACCCCCACCAACACCATCAGCGTGACC
CCCACCAACAACAGCACCCCCACCAACAACAGCAACCCCAAGCCCAACCCCGCTAGCTCCCGG
CCGGGGCTGCCGGTCGAGTACCTGCAGGTGCCGTCGCCGTCGATGGGCCGCGACATCAAGGTT
CAGTTCCAGAGCGGTGGGAACAACTCACCTGCGGTTTATCTGCTCGACGGCCTGCGCGCCCAA
GACGACTACAACGGCTGGGATATCAACACCCCGGCGTTCGAGTGGTACTACCAGTCGGGACTG
TCGATAGTCATGCCGGTCGGCGGGCAGTCCAGCTTCTACAGCGACTGGTACAGCCCGGCCTGC
GGTAAGGCTGGCTGCCAGACTTACAAGTGGGAAACCTTCCTGACCAGCGAGCTGCCGCAATGG
TTGTCCGCCAACAGGGCCGTGAAGCCCACCGGCAGCGCTGCAATCGGCTTGTCGATGGCCGGC
TCGTCGGCAATGATCTTGGCCGCCTACCACCCCCAGCAGTTCATCTACGCCGGCTCGCTGTCGG
CCCTGCTGGACCCCTCTCAGGGGATGGGGCCTAGCCTGATCGGCCTCGCGATGGGTGACGCCG
GCGGTTACAAGGCCGCAGACATGTGGGGTCCCTCGAGTGACCCGGCATGGGAGCGCAACGAC
CCTACGCAGCAGATCCCCAAGCTGGTCGCAAACAACACCCGGCTATGGGTTTATTGCGGGAAC
GGCACCCCGAACGAGTTGGGCGGTGCCAACATACCCGCCGAGTTCTTGGAGAACTTCGTTCGT
AGCAGCAACCTGAAGTTCCAGGATGCGTACAACGCCGCGGGCGGGCACAACGCCGTGTTCAA
CTTCCCGCCCAACGGCACGCACAGCTGGGAGTACTGGGGCGCTCAGCTCAACGCCATGAAGGG
TGACCTGCAGAGTTCGTTAGGCGCCGGCGAATTCCCCACCAGCACCCCCGCCGACAGCAGCAC
CATCACCCCCACCGCCACCCCCACCGCCACCCCCACCATCAAGGGCACTAGCATGACAGAGCA
GCAGTGGAATTTCGCGGGTATCGAGGCCGCGGCAAGCGCAATCCAGGGAAATGTCACGTCCAT
TCATTCCCTCCTTGACGAGGGGAAGCAGTCCCTGACCAAGCTCGCAGCGGCCTGGGGCGGTAG
CGGTTCGGAGGCGTACCAGGGTGTCCAGCAAAAATGGGACGCCACGGCTACCGAGCTGAACA
ACGCGCTGCAGAACCTGGCGCGGACGATCAGCGAAGCCGGTCAGGCAATGGCTTCGACCGAA
GGCAACGTCACTGGGATGTTCGCAAAGCTTGGCGGCGCGCCTACCAACGGCAGCATCACCGTG
GCCGCCACCGCCCCCACCGTGACCCCCACCGTGAACGCCACCCCCAGCGCCGCCTCTAGCGCC
GCGCCCAAGACCTACTGCGAGGAGTTGAAAGGCACCGATACCGGCCAGGCGTGCCAGATTCA
AATGTCCGACCCGGCCTACAACATCAACATCAGCCTGCCCAGTTACTACCCCGACCAGAAGTC
GCTGGAAAATTACATCGCCCAGACGCGCGACAAGTTCCTCAGCGCGGCCACATCGTCCACTCC
ACGCGAAGCCCCCTACGAATTGAATATCACCTCGGCCACATACCAGTCCGCGATACCGCCGCG
TGGTACGCAGGCCGTGGTGCTCAAGGTCTACCAGAACGCCGGCGGCACGCACCCAACGACCAC
GTACAAGGCCTTCGATTGGGACCAGGCCTATCGCAAGCCAATCACCTATGACACGCTGTGGCA
GGCTGACACCGATCCGCTGCCAGTCGTCTTCCCCATTGTGCAAGGTGAACTGAGCAAGCAGAC
CGGACAACAGGTATCGATAGCGCCGAATGCCGGCTTGGACCCGGTGAATTATCAGAACTTCGC
AGTCACGAACGACGGGGTGATTTTCTTCTTCAACCCGGGGGAGTTGCTGCCCGAAGCAGCCGG
CCCAACCCAGGTATTGGTCCCACGTTCCGCGATCGACTCGATGCTGGCCGAATTCTAGGCG
Protein sequence PAB2058 - rAB-cetHS-puro[manti-CD40_12E12.3F3_H-V-SLAML-hIgG4H-C-
Flex-v1-m.tbAg85BDel41 (M. tb. antigen - bold)-f2-m.tbESAT6 (M. tb. antigen -
underlined)-f4-m.tbRv1980 (M. tb. antigen - italics)].
(SEQ ID NO: 145)
EVKLVESGGGLVQPGGSLKLSCATSGFTFSDYYMYWVRQTPEKRLEWVAYINSGGGSTYY
PDTVKGRFTISRDNAKNTLYLQMSRLKSEDTAMYYCARRGLPFHAMDYWGQGTSVTVSSAKTKG
PSVFPLAPCSRSTSESTAALGCLVKDYFPEPVTVSWNSGALTSGVHTFPAVLQSSGLYSLSSVVTVP
SSSLGTKTYTCNVDHKPSNTKVDKRVESKYGPPCPPCPAPEFEGGPSVFLFPPKPKDTLMISRTPEVT
CVVVDVSQEDPEVQFNWYVDGVEVHNAKTKPREEQFNSTYRVVSVLTVLHQDWLNGKEYKCKV
SNKGLPSSIEKTISKAKGQPREPQVYTLPPSQEEMTKNQVSLTCLVKGFYPSDIAVEWESNGQPENN
YKTTPPVLDSDGSFFLYSRLTVDKSRWQEGNVFSCSVMHEALHNHYTQKSLSLSLGKASQTPTNTI
SVTPTNNSTPTNNSNPKPNPASSRPGLPVEYLQVPSPSMGRDIKVQFQSGGNNSPAVYLLDGLR
AQDDYNGWDINTPAFEWYYQSGLSIVMPVGGQSSFYSDWYSPACGKAGCQTYKWETFLTSE
LPQWLSANRAVKPTGSAAIGLSMAGSSAMILAAYHPQQFIYAGSLSALLDPSQGMGPSLIGLA
MGDAGGYKAADMWGPSSDPAWERNDPTQQIPKLVANNTRLWVYCGNGTPNELGGANIPAE
FLENFVRSSNLKFQDAYNAAGGHNAVFNFPPNGTHSWEYWGAQLNAMKGDLQSSLGAGEFP
TSTPADSSTITPTATPTATPTIKGTSMTEQQWNFAGIEAAASAIQGNVTSIHSLLDEGKQSLTKLAAA
WGGSGSEAYQGVQQKWDATATELNNALQNLARTISEAGQAMASTEGNVTGMFAKLGGAPTNGSI
TVAATAPTVTPTVNATPSAASSAAPKTYCEELKGTDTGQACQIQMSDPAYNINISLPSYYPDQKSLENYI
AQTRDKFLSAATSSTPREAPYELNITSATYQSAIPPRGTQAVVLKVYQNAGGTHPTTTYKAFDWDQAYRKP
ITYDTLWQADTDPLPVVFPIVQGELSKQTGQQVSIAPNAGLDPVNYQNFAVTNVDGVIFFFNPGELLPEAA
GPTQVLVPRSAIDSMLAEF
C2083: rAB-cetHS-puro[manti-CD40_12E12.3F3_H-V-SLAML-hIgG4H-C-Flex-v1-m.tbRv1980
(M. tb. antigen - bold)-f4-m.tbRv0288 (M. tb. antigen - underlined)-f2-
m.tbAg85BDel41(M. tb. antigen - italics)]
(SEQ ID NO: 146)
ATGGACCCCAAAGGCTCCCTTTCCTGGAGAATACTTCTGTTTCTCTCCCTGGCTTTTGAG
TTGTCGTACGGAGAAGTGAAGCTGGTGGAGTCTGGGGGAGGCTTAGTGCAGCCTGGAGGGTCC
CTGAAACTCTCCTGTGCAACCTCTGGATTCACTTTCAGTGACTATTACATGTATTGGGTTCGCC
AGACTCCAGAGAAGAGGCTGGAGTGGGTCGCATACATTAATTCTGGTGGTGGTAGCACCTATT
ATCCAGACACTGTAAAGGGCCGATTCACCATCTCCAGAGACAATGCCAAGAACACCCTGTACC
TGCAAATGAGCCGGCTGAAGTCTGAGGACACAGCCATGTATTACTGTGCAAGACGGGGGTTAC
CGTTCCATGCTATGGACTATTGGGGTCAAGGAACCTCAGTCACCGTCTCCTCAGCCAAAACGA
AGGGCCCATCCGTCTTCCCCCTGGCGCCCTGCTCCAGGAGCACCTCCGAGAGCACAGCCGCCC
TGGGCTGCCTGGTCAAGGACTACTTCCCCGAACCGGTGACGGTGTCGTGGAACTCAGGCGCCC
TGACCAGCGGCGTGCACACCTTCCCGGCTGTCCTACAGTCCTCAGGACTCTACTCCCTCAGCAG
CGTGGTGACCGTGCCCTCCAGCAGCTTGGGCACGAAGACCTACACCTGCAACGTAGATCACAA
GCCCAGCAACACCAAGGTGGACAAGAGAGTTGAGTCCAAATATGGTCCCCCATGCCCACCCTG
CCCAGCACCTGAGTTCGAAGGGGGACCATCAGTCTTCCTGTTCCCCCCAAAACCCAAGGACAC
TCTCATGATCTCCCGGACCCCTGAGGTCACGTGCGTGGTGGTGGACGTGAGCCAGGAAGACCC
CGAGGTCCAGTTCAACTGGTACGTGGATGGCGTGGAGGTGCATAATGCCAAGACAAAGCCGC
GGGAGGAGCAGTTCAACAGCACGTACCGTGTGGTCAGCGTCCTCACCGTCCTGCACCAGGACT
GGCTGAACGGCAAGGAGTACAAGTGCAAGGTCTCCAACAAAGGCCTCCCGTCCTCCATCGAGA
AAACCATCTCCAAAGCCAAAGGGCAGCCCCGAGAGCCACAGGTGTACACCCTGCCCCCATCCC
AGGAGGAGATGACCAAGAACCAGGTCAGCCTGACCTGCCTGGTCAAAGGCTTCTACCCCAGCG
ACATCGCCGTGGAGTGGGAGAGCAATGGGCAGCCGGAGAACAACTACAAGACCACGCCTCCC
GTGCTGGACTCCGACGGCTCCTTCTTCCTCTACAGCAGGCTAACCGTGGACAAGAGCAGGTGG
CAGGAGGGGAATGTCTTCTCATGCTCCGTGATGCATGAGGCTCTGCACAACCACTACACACAG
AAGAGCCTCTCCCTGTCTCTGGGTAAAGCTAGTCAGACCCCCACCAACACCATCAGCGTGACC
CCCACCAACAACAGCACCCCCACCAACAACAGCAACCCCAAGCCCAACCCCGCTAGCGCCGC
GCCCAAGACCTACTGCGAGGAGTTGAAAGGCACCGATACCGGCCAGGCGTGCCAGATTCAAA
TGTCCGACCCGGCCTACAACATCAACATCAGCCTGCCCAGTTACTACCCCGACCAGAAGTCGC
TGGAAAATTACATCGCCCAGACGCGCGACAAGTTCCTCAGCGCGGCCACATCGTCCACTCCAC
GCGAAGCCCCCTACGAATTGAATATCACCTCGGCCACATACCAGTCCGCGATACCGCCGCGTG
GTACGCAGGCCGTGGTGCTCAAGGTCTACCAGAACGCCGGCGGCACGCACCCAACGACCACGT
ACAAGGCCTTCGATTGGGACCAGGCCTATCGCAAGCCAATCACCTATGACACGCTGTGGCAGG
CTGACACCGATCCGCTGCCAGTCGTCTTCCCCATTGTGCAAGGTGAACTGAGCAAGCAGACCG
GACAACAGGTATCGATAGCGCCGAATGCCGGCTTGGACCCGGTGAATTATCAGAACTTCGCAG
TCACGAACGACGGGGTGATTTTCTTCTTCAACCCGGGGGAGTTGCTGCCCGAAGCAGCCGGCC
CAACCCAGGTATTGGTCCCACGTTCCGCGATCGACTCGATGCTGGCCAAGCTTGGCGGCGCGC
CTACCAACGGCAGCATCACCGTGGCCGCCACCGCCCCCACCGTGACCCCCACCGTGAACGCCA
CCCCCAGCGCCGCCTCTAGCATGTCGCAAATCATGTACAACTACCCCGCGATGTTGGGTCACG
CCGGGGATATGGCCGGATATGCCGGCACGCTGCAGAGCTTGGGTGCCGAGATCGCCGTGGAGC
AGGCCGCGTTGCAGAGTGCGTGGCAGGGCGATACCGGGATCACGTATCAGGCGTGGCAGGCA
CAGTGGAACCAGGCCATGGAAGATTTGGTGCGGGCCTATCATGCGATGTCCAGCACCCATGAA
GCCAACACCATGGCGATGATGGCCCGCGACACGGCCGAAGCCGCCAAATGGGGCGGCGAATT
CCCCACCAGCACCCCCGCCGACAGCAGCACCATCACCCCCACCGCCACCCCCACCGCCACCCC
CACCATCAAGGGCACTAGCTCCCGGCCGGGGCTGCCGGTCGAGTACCTGCAGGTGCCGTCGCC
GTCGATGGGCCGCGACATCAAGGTTCAGTTCCAGAGCGGTGGGAACAACTCACCTGCGGTTTA
TCTGCTCGACGGCCTGCGCGCCCAAGACGACTACAACGGCTGGGATATCAACACCCCGGCGTT
CGAGTGGTACTACCAGTCGGGACTGTCGATAGTCATGCCGGTCGGCGGGCAGTCCAGCTTCTA
CAGCGACTGGTACAGCCCGGCCTGCGGTAAGGCTGGCTGCCAGACTTACAAGTGGGAAACCTT
CCTGACCAGCGAGCTGCCGCAATGGTTGTCCGCCAACAGGGCCGTGAAGCCCACCGGCAGCGC
TGCAATCGGCTTGTCGATGGCCGGCTCGTCGGCAATGATCTTGGCCGCCTACCACCCCCAGCA
GTTCATCTACGCCGGCTCGCTGTCGGCCCTGCTGGACCCCTCTCAGGGGATGGGGCCTAGCCTG
ATCGGCCTCGCGATGGGTGACGCCGGCGGTTACAAGGCCGCAGACATGTGGGGTCCCTCGAGT
GACCCGGCATGGGAGCGCAACGACCCTACGCAGCAGATCCCCAAGCTGGTCGCAAACAACAC
CCGGCTATGGGTTTATTGCGGGAACGGCACCCCGAACGAGTTGGGCGGTGCCAACATACCCGC
CGAGTTCTTGGAGAACTTCGTTCGTAGCAGCAACCTGAAGTTCCAGGATGCGTACAACGCCGC
GGGCGGGCACAACGCCGTGTTCAACTTCCCGCCCAACGGCACGCACAGCTGGGAGTACTGGGG
CGCTCAGCTCAACGCCATGAAGGGTGACCTGCAGAGTTCGTTAGGCGCCGGCTGAGCGGCC
Protein sequence PAB2122 - rAB-cetHS-puro[manti-CD40_12E12.3F3_H-V-SLAML-hIgG4H-C-
Flex-v1-m.tbRv1980 (M. tb. antigen - bold)-f4-m.tbRv0288 (M. tb. antigen -
underlined)-f2-m.tbAg85BDel41 (M. tb. antigen - italics)].
(SEQ ID NO: 147)
EVKLVESGGGLVQPGGSLKLSCATSGFTFSDYYMYWVRQTPEKRLEWVAYINSGGGSTYY
PDTVKGRFTISRDNAKNTLYLQMSRLKSEDTAMYYCARRGLPFHAMDYWGQGTSVTVSSAKTKG
PSVFPLAPCSRSTSESTAALGCLVKDYFPEPVTVSWNSGALTSGVHTFPAVLQSSGLYSLSSVVTVP
SSSLGTKTYTCNVDHKPSNTKVDKRVESKYGPPCPPCPAPEFEGGPSVFLFPPKPKDTLMISRTPEVT
CVVVDVSQEDPEVQFNWYVDGVEVHNAKTKPREEQFNSTYRVVSVLTVLHQDWLNGKEYKCKV
SNKGLPSSIEKTISKAKGQPREPQVYTLPPSQEEMTKNQVSLTCLVKGFYPSDIAVEWESNGQPENN
YKTTPPVLDSDGSFFLYSRLTVDKSRWQEGNVFSCSVMHEALHNHYTQKSLSLSLGKASQTPTNTI
SVTPTNNSTPTNNSNPKPNPASAAPKTYCEELKGTDTGQACQIQMSDPAYNINISLPSYYPDQKS
LENYIAQTRDKFLSAATSSTPREAPYELNITSATYQSAIPPRGTQAVVLKVYQNAGGTHPTTTY
KAFDWDQAYRKPITYDTLWQADTDPLPVVFPIVQGELSKQTGQQVSIAPNAGLDPVNYQNFA
VTNDGVIFFFNPGELLPEAAGPTQVLVPRSAIDSMLAKLGGAPTNGSITVAATAPTVTPTVNATP
SAASSMSQIMYNYPAMLGHAGDMAGYAGTLQSLGAEIAVEQAALQSAWQGDTGITYQAWQAQ
WNQAMEDLVRAYHAMSSTHEANTMAMMARDTAEAAKWGGEFPTSTPADSSTITPTATPTATPTI
KGTSSRPGLPVEYLQVPSPSMGRDIKVQFQSGGNNSPAVYLLDGLRAQDDYNGWDINTPAFEWYYQSGL
SIVMPVGGQSSFYSDWYSPACGKAGCQTYKWETFLTSELPQWLSANRAVKPTGSAAIGLSMAGSSAMILA
AYHPQQFIYAGSLSALLDPSQGMGPSLIGLAMGDAGGYKAADMWGPSSDPAWERNDPTQQIPKLVANN
TRLWVYCGNGTPNELGGANIPAEFLENFVRSSNLKFQDAYNAAGGHNAVFNFPPNGTHSWEYWGAQLN
AMKGDLQSSLGAG
C1590: rAB-cetHS-puro[mAnti-DCIR_9E8_H-LV-hIgG4H-C-Flex-v1-m.tbCFP10 (M. tb.
antigen - bold)-f2-m.tbESAT6 (M. tb. antigen - underlined)].
(SEQ ID NO: 148)
ATGAACAGGCTTACTTCCTCATTGCTGCTGCTGATTGTCCCTGCATATGTCCTGTCCCAG
GTTACTCTGAAAGAGTCTGGCCCTGGGATATTGCAGCCCTCCCAGACCCTCAGTCTGACTTGTT
CTTTCTCTGGGTTTTCACTGAGCACTTCTGGTATGGGTCTGAGCTGGATTCGTCAGCCTTCAGG
AAAGGGTCTGGAGTGGCTGGCACACATTTACTGGGATGATGACAAGCGCTATAACCCATCCCT
GAAGAGCCGGCTCACAATCTCCAAGGATACCTCCAGCAACCAGGTTTTCCTCAAGATCACCAT
TGTGGACACTGCAGATGCTGCCACATACTACTGTGCTCGAAGCTCCCATTACTACGGTTATGGC
TACGGGGGATACTTCGATGTCTGGGGCGCAGGGACCACGGTCACCGTCTCCTCAGCCAAAACG
AAGGGCCCATCCGTCTTCCCCCTGGCGCCCTGCTCCAGGAGCACCTCCGAGAGCACAGCCGCC
CTGGGCTGCCTGGTCAAGGACTACTTCCCCGAACCGGTGACGGTGTCGTGGAACTCAGGCGCC
CTGACCAGCGGCGTGCACACCTTCCCGGCTGTCCTACAGTCCTCAGGACTCTACTCCCTCAGCA
GCGTGGTGACCGTGCCCTCCAGCAGCTTGGGCACGAAGACCTACACCTGCAACGTAGATCACA
AGCCCAGCAACACCAAGGTGGACAAGAGAGTTGAGTCCAAATATGGTCCCCCATGCCCACCCT
GCCCAGCACCTGAGTTCGAAGGGGGACCATCAGTCTTCCTGTTCCCCCCAAAACCCAAGGACA
CTCTCATGATCTCCCGGACCCCTGAGGTCACGTGCGTGGTGGTGGACGTGAGCCAGGAAGACC
CCGAGGTCCAGTTCAACTGGTACGTGGATGGCGTGGAGGTGCATAATGCCAAGACAAAGCCGC
GGGAGGAGCAGTTCAACAGCACGTACCGTGTGGTCAGCGTCCTCACCGTCCTGCACCAGGACT
GGCTGAACGGCAAGGAGTACAAGTGCAAGGTCTCCAACAAAGGCCTCCCGTCCTCCATCGAGA
AAACCATCTCCAAAGCCAAAGGGCAGCCCCGAGAGCCACAGGTGTACACCCTGCCCCCATCCC
AGGAGGAGATGACCAAGAACCAGGTCAGCCTGACCTGCCTGGTCAAAGGCTTCTACCCCAGCG
ACATCGCCGTGGAGTGGGAGAGCAATGGGCAGCCGGAGAACAACTACAAGACCACGCCTCCC
GTGCTGGACTCCGACGGCTCCTTCTTCCTCTACAGCAGGCTAACCGTGGACAAGAGCAGGTGG
CAGGAGGGGAATGTCTTCTCATGCTCCGTGATGCATGAGGCTCTGCACAACCACTACACACAG
AAGAGCCTCTCCCTGTCTCTGGGTAAAGCTAGCATGGCAGAGATGAAGACCGATGCCGCTACC
CTCGCGCAGGAGGCAGGTAATTTCGAGCGGATCTCCGGCGACCTGAAAACCCAGATCGACCAG
GTGGAGTCGACGGCAGGTTCGTTGCAGGGCCAGTGGCGCGGCGCGGCGGGGACGGCCGCCCA
GGCCGCGGTGGTGCGCTTCCAAGAAGCAGCCAATAAGCAGAAGCAGGAACTCGACGAGATCT
CGACGAATATTCGTCAGGCCGGCGTCCAATACTCGAGGGCCGACGAGGAGCAGCAGCAGGCG
CTGTCCTCGCAAATGGGCTTCGAATTCCCCACCAGCACCCCCGCCGACAGCAGCACCATCACC
CCCACCGCCACCCCCACCGCCACCCCCACCATCAAGGGCACTAGCATGACAGAGCAGCAGTGG
AATTTCGCGGGTATCGAGGCCGCGGCAAGCGCAATCCAGGGAAATGTCACGTCCATTCATTCC
CTCCTTGACGAGGGGAAGCAGTCCCTGACCAAGCTCGCAGCGGCCTGGGGCGGTAGCGGTTCG
GAGGCGTACCAGGGTGTCCAGCAAAAATGGGACGCCACGGCTACCGAGCTGAACAACGCGCT
GCAGAACCTGGCGCGGACGATCAGCGAAGCCGGTCAGGCAATGGCTTCGACCGAAGGCAACG
TCACTGGGATGTTCGCATAGGCGGCC
Protein sequence PAB1686 - rAB-cetHS-puro[mAnti-DCIR_9E8_H-LV-hIgG4H-C-Flex-v1-
m.tbCFP10 (M. tb. antigen - bold)-f2-m.tbESAT6 (M. tb. antigen - underlined)].
(SEQ ID NO: 149)
[sequence omitted]
C1589: rAB-cetHS-puro[hIgG4H-Flex-v1-m.tbCFP10 (M. tb. antigen - bold)-
f2-m.tbESAT6 (M. tb. antigen - underlined)].
(SEQ ID NO: 150)
ATGGACCTCCTGTGCAAGAACATGAAGCACCTGTGGTTCTTCCTCCTGCTGGTGGCGGC
TCCCAGATGGGTCCTGTCCCGGCTGCAGCTGCAGGAGTCGGGCCCAGGCCTGCTGAAGCCTTC
GGTGACCCTGTCCCTCACCTGCACTGTCTCGGGTGACTCCGTCGCCAGTAGTTCTTATTACTGG
GGCTGGGTCCGTCAGCCCCCAGGGAAGGGACTCGAGTGGATAGGGACTATCAATTTTAGTGGC
AATATGTATTATAGTCCGTCCCTCAGGAGTCGAGTGACCATGTCGGCAGACATGTCCGAGAAC
TCCTTCTATCTGAAATTGGACTCTGTGACCGCAGCAGACACGGCCGTCTATTATTGTGCGGCAG
GACACCTCGTTATGGGATTTGGGGCCCACTGGGGACAGGGAAAACTGGTCTCCGTCTCTCCAG
CTTCCACCAAGGGCCCATCCGTCTTCCCCCTGGCGCCCTGCTCCAGGAGCACCTCCGAGAGCAC
AGCCGCCCTGGGCTGCCTGGTCAAGGACTACTTCCCCGAACCGGTGACGGTGTCGTGGAACTC
AGGCGCCCTGACCAGCGGCGTGCACACCTTCCCGGCTGTCCTACAGTCCTCAGGACTCTACTCC
CTCAGCAGCGTGGTGACCGTGCCCTCCAGCAGCTTGGGCACGAAGACCTACACCTGCAACGTA
GATCACAAGCCCAGCAACACCAAGGTGGACAAGAGAGTTGAGTCCAAATATGGTCCCCCATG
CCCACCCTGCCCAGCACCTGAGTTCGAAGGGGGACCATCAGTCTTCCTGTTCCCCCCAAAACCC
AAGGACACTCTCATGATCTCCCGGACCCCTGAGGTCACGTGCGTGGTGGTGGACGTGAGCCAG
GAAGACCCCGAGGTCCAGTTCAACTGGTACGTGGATGGCGTGGAGGTGCATAATGCCAAGAC
AAAGCCGCGGGAGGAGCAGTTCAACAGCACGTACCGTGTGGTCAGCGTCCTCACCGTCCTGCA
CCAGGACTGGCTGAACGGCAAGGAGTACAAGTGCAAGGTCTCCAACAAAGGCCTCCCGTCCTC
CATCGAGAAAACCATCTCCAAAGCCAAAGGGCAGCCCCGAGAGCCACAGGTGTACACCCTGC
CCCCATCCCAGGAGGAGATGACCAAGAACCAGGTCAGCCTGACCTGCCTGGTCAAAGGCTTCT
ACCCCAGCGACATCGCCGTGGAGTGGGAGAGCAATGGGCAGCCGGAGAACAACTACAAGACC
ACGCCTCCCGTGCTGGACTCCGACGGCTCCTTCTTCCTCTACAGCAGGCTAACCGTGGACAAGA
GCAGGTGGCAGGAGGGGAATGTCTTCTCATGCTCCGTGATGCATGAGGCTCTGCACAACCACT
ACACACAGAAGAGCCTCTCCCTGTCTCTGGGTAAAGCTAGCATGGCAGAGATGAAGACCGATG
CCGCTACCCTCGCGCAGGAGGCAGGTAATTTCGAGCGGATCTCCGGCGACCTGAAAACCCAGA
TCGACCAGGTGGAGTCGACGGCAGGTTCGTTGCAGGGCCAGTGGCGCGGCGCGGCGGGGACG
GCCGCCCAGGCCGCGGTGGTGCGCTTCCAAGAAGCAGCCAATAAGCAGAAGCAGGAACTCGA
CGAGATCTCGACGAATATTCGTCAGGCCGGCGTCCAATACTCGAGGGCCGACGAGGAGCAGC
AGCAGGCGCTGTCCTCGCAAATGGGCTTCGAATTCCCCACCAGCACCCCCGCCGACAGCAGCA
CCATCACCCCCACCGCCACCCCCACCGCCACCCCCACCATCAAGGGCACTAGCATGACAGAGC
AGCAGTGGAATTTCGCGGGTATCGAGGCCGCGGCAAGCGCAATCCAGGGAAATGTCACGTCC
ATTCATTCCCTCCTTGACGAGGGGAAGCAGTCCCTGACCAAGCTCGCAGCGGCCTGGGGCGGT
AGCGGTTCGGAGGCGTACCAGGGTGTCCAGCAAAAATGGGACGCCACGGCTACCGAGCTGAA
CAACGCGCTGCAGAACCTGGCGCGGACGATCAGCGAAGCCGGTCAGGCAATGGCTTCGACCG
AAGGCAACGTCACTGGGATGTTCGCATAGGCGGCC
Protein sequence PAB1687 - rAB-cetHS-puro[hIgG4H-Flex-v1-m.tbCFP10 (M. tb.
antigen - bold)-f2-m.tbESAT6 (M. tb. antigen - underlined)].
(SEQ ID NO: 151)
RLQLQESGPGLLKPSVTLSLTCTVSGDSVASSSYYWGWVRQPPGKGLEWIGTINFSGNMYY
SPSLRSRVTMSADMSENSFYLKLDSVTAADTAVYYCAAGHLVMGFGAHWGQGKLVSVSPASTKG
PSVFPLAPCSRSTSESTAALGCLVKDYFPEPVTVSWNSGALTSGVHTFPAVLQSSGLYSLSSVVTVP
SSSLGTKTYTCNVDHKPSNTKVDKRVESKYGPPCPPCPAPEFEGGPSVFLFPPKPKDTLMISRTPEVT
CVVVDVSQEDPEVQFNWYVDGVEVHNAKTKPREEQFNSTYRVVSVLTVLHQDWLNGKEYKCKV
SNKGLPSSIEKTISKAKGQPREPQVYTLPPSQEEMTKNQVSLTCLVKGFYPSDIAVEWESNGQPENN
YKTTPPVLDSDGSFFLYSRLTVDKSRWQEGNVFSCSVMHEALHNHYTQKSLSLSLGKASMAEMK
TDAATLAQEAGNFERISGDLKTQIDQVESTAGSLQGQWRGAAGTAAQAAVVRFQEAANKQK
QELDEISTNIRQAGVQYSRADEEQQQALSSQMGFEFPTSTPADSSTITPTATPTATPTIKGTSMTE
QQWNFAGIEAAASAIQGNVTSIHSLLDEGKQSLTKLAAAWGGSGSEAYQGVQQKWDATATELNN
ALQNLARTISEAGQAMASTEGNVTGMFA
C1588: rAB-cetHS-puro[manti-CD40_12E12.3F3_H-V-SLAML-hIgG4H-C-Flex-v1-m.tbCFP10
(M. tb. antigen - bold)-f2-m.tbESAT6 (M. tb. antigen - underlined)].
(SEQ ID NO: 152)
ATGGACCCCAAAGGCTCCCTTTCCTGGAGAATACTTCTGTTTCTCTCCCTGGCTTTTGAG
TTGTCGTACGGAGAAGTGAAGCTGGTGGAGTCTGGGGGAGGCTTAGTGCAGCCTGGAGGGTCC
CTGAAACTCTCCTGTGCAACCTCTGGATTCACTTTCAGTGACTATTACATGTATTGGGTTCGCC
AGACTCCAGAGAAGAGGCTGGAGTGGGTCGCATACATTAATTCTGGTGGTGGTAGCACCTATT
ATCCAGACACTGTAAAGGGCCGATTCACCATCTCCAGAGACAATGCCAAGAACACCCTGTACC
TGCAAATGAGCCGGCTGAAGTCTGAGGACACAGCCATGTATTACTGTGCAAGACGGGGGTTAC
CGTTCCATGCTATGGACTATTGGGGTCAAGGAACCTCAGTCACCGTCTCCTCAGCCAAAACGA
AGGGCCCATCCGTCTTCCCCCTGGCGCCCTGCTCCAGGAGCACCTCCGAGAGCACAGCCGCCC
TGGGCTGCCTGGTCAAGGACTACTTCCCCGAACCGGTGACGGTGTCGTGGAACTCAGGCGCCC
TGACCAGCGGCGTGCACACCTTCCCGGCTGTCCTACAGTCCTCAGGACTCTACTCCCTCAGCAG
CGTGGTGACCGTGCCCTCCAGCAGCTTGGGCACGAAGACCTACACCTGCAACGTAGATCACAA
GCCCAGCAACACCAAGGTGGACAAGAGAGTTGAGTCCAAATATGGTCCCCCATGCCCACCCTG
CCCAGCACCTGAGTTCGAAGGGGGACCATCAGTCTTCCTGTTCCCCCCAAAACCCAAGGACAC
TCTCATGATCTCCCGGACCCCTGAGGTCACGTGCGTGGTGGTGGACGTGAGCCAGGAAGACCC
CGAGGTCCAGTTCAACTGGTACGTGGATGGCGTGGAGGTGCATAATGCCAAGACAAAGCCGC
GGGAGGAGCAGTTCAACAGCACGTACCGTGTGGTCAGCGTCCTCACCGTCCTGCACCAGGACT
GGCTGAACGGCAAGGAGTACAAGTGCAAGGTCTCCAACAAAGGCCTCCCGTCCTCCATCGAGA
AAACCATCTCCAAAGCCAAAGGGCAGCCCCGAGAGCCACAGGTGTACACCCTGCCCCCATCCC
AGGAGGAGATGACCAAGAACCAGGTCAGCCTGACCTGCCTGGTCAAAGGCTTCTACCCCAGCG
ACATCGCCGTGGAGTGGGAGAGCAATGGGCAGCCGGAGAACAACTACAAGACCACGCCTCCC
GTGCTGGACTCCGACGGCTCCTTCTTCCTCTACAGCAGGCTAACCGTGGACAAGAGCAGGTGG
CAGGAGGGGAATGTCTTCTCATGCTCCGTGATGCATGAGGCTCTGCACAACCACTACACACAG
AAGAGCCTCTCCCTGTCTCTGGGTAAAGCTAGCATGGCAGAGATGAAGACCGATGCCGCTACC
CTCGCGCAGGAGGCAGGTAATTTCGAGCGGATCTCCGGCGACCTGAAAACCCAGATCGACCAG
GTGGAGTCGACGGCAGGTTCGTTGCAGGGCCAGTGGCGCGGCGCGGCGGGGACGGCCGCCCA
GGCCGCGGTGGTGCGCTTCCAAGAAGCAGCCAATAAGCAGAAGCAGGAACTCGACGAGATCT
CGACGAATATTCGTCAGGCCGGCGTCCAATACTCGAGGGCCGACGAGGAGCAGCAGCAGGCG
CTGTCCTCGCAAATGGGCTTCGAATTCCCCACCAGCACCCCCGCCGACAGCAGCACCATCACC
CCCACCGCCACCCCCACCGCCACCCCCACCATCAAGGGCACTAGCATGACAGAGCAGCAGTGG
AATTTCGCGGGTATCGAGGCCGCGGCAAGCGCAATCCAGGGAAATGTCACGTCCATTCATTCC
CTCCTTGACGAGGGGAAGCAGTCCCTGACCAAGCTCGCAGCGGCCTGGGGCGGTAGCGGTTCG
GAGGCGTACCAGGGTGTCCAGCAAAAATGGGACGCCACGGCTACCGAGCTGAACAACGCGCT
GCAGAACCTGGCGCGGACGATCAGCGAAGCCGGTCAGGCAATGGCTTCGACCGAAGGCAACG
TCACTGGGATGTTCGCATAGGCGGCC
Protein sequence PAB1685 - rAB-cetHS-puro[manti-CD40_12E12.3F3_H-V-SLAML-hIgG4H-C-
Flex-v1-m.tbCFP10 (M. tb. antigen - bold)-f2-m.tbESAT6 (M. tb. antigen -
underlined)].
(SEQ ID NO: 153)
EVKLVESGGGLVQPGGSLKLSCATSGFTFSDYYMYWVRQTPEKRLEWVAYINSGGGSTYY
PDTVKGRFTISRDNAKNTLYLQMSRLKSEDTAMYYCARRGLPFHAMDYWGQGTSVTVSSAKTKG
PSVFPLAPCSRSTSESTAALGCLVKDYFPEPVTVSWNSGALTSGVHTFPAVLQSSGLYSLSSVVTVP
SSSLGTKTYTCNVDHKPSNTKVDKRVESKYGPPCPPCPAPEFEGGPSVFLFPPKPKDTLMISRTPEVT
CVVVDVSQEDPEVQFNWYVDGVEVHNAKTKPREEQFNSTYRVVSVLTVLHQDWLNGKEYKCKV
SNKGLPSSIEKTISKAKGQPREPQVYTLPPSQEEMTKNQVSLTCLVKGFYPSDIAVEWESNGQPENN
YKTTPPVLDSDGSFFLYSRLTVDKSRWQEGNVFSCSVMHEALHNHYTQKSLSLSLGKASMAEMK
TDAATLAQEAGNFERISGDLKTQIDQVESTAGSLQGQWRGAAGTAAQAAVVRFQEAANKQK
QELDEISTNIRQAGVQYSRADEEQQQALSSQMGFEFPTSTPADSSTITPTATPTATPTIKGTSMTE
QQWNFAGIEAAASAIQGNVTSIHSLLDEGKQSLTKLAAAWGGSGSEAYQGVQQKWDATATELNN
ALQNLARTISEAGQAMASTEGNVTGMFA
C1261: rAB-pIRES2[mAnti-DCIR_9E8_H-LV-hIgG4H-C-Flex-v1-m.tbHspX (M. tb. antigen -
bold)].
(SEQ ID NO: 154)
ATGAACAGGCTTACTTCCTCATTGCTGCTGCTGATTGTCCCTGCATATGTCCTGTCCCAG
GTTACTCTGAAAGAGTCTGGCCCTGGGATATTGCAGCCCTCCCAGACCCTCAGTCTGACTTGTT
CTTTCTCTGGGTTTTCACTGAGCACTTCTGGTATGGGTCTGAGCTGGATTCGTCAGCCTTCAGG
AAAGGGTCTGGAGTGGCTGGCACACATTTACTGGGATGATGACAAGCGCTATAACCCATCCCT
GAAGAGCCGGCTCACAATCTCCAAGGATACCTCCAGCAACCAGGTTTTCCTCAAGATCACCAT
TGTGGACACTGCAGATGCTGCCACATACTACTGTGCTCGAAGCTCCCATTACTACGGTTATGGC
TACGGGGGATACTTCGATGTCTGGGGCGCAGGGACCACGGTCACCGTCTCCTCAGCCAAAACG
AAGGGCCCATCCGTCTTCCCCCTGGCGCCCTGCTCCAGGAGCACCTCCGAGAGCACAGCCGCC
CTGGGCTGCCTGGTCAAGGACTACTTCCCCGAACCGGTGACGGTGTCGTGGAACTCAGGCGCC
CTGACCAGCGGCGTGCACACCTTCCCGGCTGTCCTACAGTCCTCAGGACTCTACTCCCTCAGCA
GCGTGGTGACCGTGCCCTCCAGCAGCTTGGGCACGAAGACCTACACCTGCAACGTAGATCACA
AGCCCAGCAACACCAAGGTGGACAAGAGAGTTGAGTCCAAATATGGTCCCCCATGCCCACCCT
GCCCAGCACCTGAGTTCGAAGGGGGACCATCAGTCTTCCTGTTCCCCCCAAAACCCAAGGACA
CTCTCATGATCTCCCGGACCCCTGAGGTCACGTGCGTGGTGGTGGACGTGAGCCAGGAAGACC
CCGAGGTCCAGTTCAACTGGTACGTGGATGGCGTGGAGGTGCATAATGCCAAGACAAAGCCGC
GGGAGGAGCAGTTCAACAGCACGTACCGTGTGGTCAGCGTCCTCACCGTCCTGCACCAGGACT
GGCTGAACGGCAAGGAGTACAAGTGCAAGGTCTCCAACAAAGGCCTCCCGTCCTCCATCGAGA
AAACCATCTCCAAAGCCAAAGGGCAGCCCCGAGAGCCACAGGTGTACACCCTGCCCCCATCCC
AGGAGGAGATGACCAAGAACCAGGTCAGCCTGACCTGCCTGGTCAAAGGCTTCTACCCCAGCG
ACATCGCCGTGGAGTGGGAGAGCAATGGGCAGCCGGAGAACAACTACAAGACCACGCCTCCC
GTGCTGGACTCCGACGGCTCCTTCTTCCTCTACAGCAGGCTAACCGTGGACAAGAGCAGGTGG
CAGGAGGGGAATGTCTTCTCATGCTCCGTGATGCATGAGGCTCTGCACAACCACTACACACAG
AAGAGCCTCTCCCTGTCTCTGGGTAAAGCTAGTCAGACCCCCACCAACACCATCAGCGTGACC
CCCACCAACAACAGCACCCCCACCAACAACAGCAACCCCAAGCCCAACCCCGCTAGCATGGCC
ACCACCCTTCCCGTTCAGCGCCACCCGCGGTCCCTCTTCCCCGAGTTTTCTGAGCTGTTCGCGG
CCTTCCCGTCATTCGCCGGACTCCGGCCCACCTTCGACACCCGGTTGATGCGGCTGGAAGACG
AGATGAAAGAGGGGCGCTACGAGGTACGCGCGGAGCTTCCCGGGGTCGACCCCGACAAGGAC
GTCGACATTATGGTCCGCGATGGTCAGCTGACCATCAAGGCCGAGCGCACCGAGCAGAAGGA
CTTCGACGGTCGCTCGGAATTCGCGTACGGTTCCTTCGTTCGCACGGTGTCGCTGCCGGTAGGT
GCTGACGAGGACGACATTAAGGCCACCTACGACAAGGGCATTCTTACTGTGTCGGTGGCGGTT
TCGGAAGGGAAGCCAACCGAAAAGCACATTCAGATCCGGTCCACCAACTGA
Protein sequence PAB1360-rAB-pIRES2[mAnti-DCIR_9E8_H-LV-hIgG4H-C-Flex-v1-m.tbHspX
(M. tb. antigen - bold)].
(SEQ ID NO: 155)
QVTLKESGPGILQPSQTLSLTCSFSGFSLSTSGMGLSWIRQPSGKGLEWLAHIYWDDDKRY
NPSLKSRLTISKDTSSNQVFLKITIVDTADAATYYCARSSHYYGYGYGGYFDVWGAGTTVTVSSAK
TKGPSVFPLAPCSRSTSESTAALGCLVKDYFPEPVTVSWNSGALTSGVHTFPAVLQSSGLYSLSSVV
TVPSSSLGTKTYTCNVDHKPSNTKVDKRVESKYGPPCPPCPAPEFEGGPSVFLFPPKPKDTLMISRTP
EVTCVVVDVSQEDPEVQFNWYVDGVEVHNAKTKPREEQFNSTYRVVSVLTVLHQDWLNGKEYK
CKVSNKGLPSSIEKTISKAKGQPREPQVYTLPPSQEEMTKNQVSLTCLVKGFYPSDIAVEWESNGQP
ENNYKTTPPVLDSDGSFFLYSRLTVDKSRWQEGNVFSCSVMHEALHNHYTQKSLSLSLGKASQTPT
NTISVTPTNNSTPTNNSNPKPNPASMATTLPVQRHPRSLFPEFSELFAAFPSFAGLRPTFDTRLM
RLEDEMKEGRYEVRAELPGVDPDKDVDIMVRDGQLTIKAERTEQKDFDGRSEFAYGSFVR
Rv1626: C1256: Ecoli-pET28[6xHis-Cohesin (underlined)-m.tbRv1626 (M. tb.
Antigen - bold)].
(SEQ ID NO: 156)
TGGCGAATGGGACGCGCCCTGTAGCGGCGCATTAAGCGCGGCGGGTGTGGTGGTTACG
CGCAGCGTGACCGCTACACTTGCCAGCGCCCTAGCGCCCGCTCCTTTCGCTTTCTTCCCTTCCTT
TCTCGCCACGTTCGCCGGCTTTCCCCGTCAAGCTCTAAATCGGGGGCTCCCTTTAGGGTTCCGA
TTTAGTGCTTTACGGCACCTCGACCCCAAAAAACTTGATTAGGGTGATGGTTCACGTAGTGGGC
CATCGCCCTGATAGACGGTTTTTCGCCCTTTGACGTTGGAGTCCACGTTCTTTAATAGTGGACT
CTTGTTCCAAACTGGAACAACACTCAACCCTATCTCGGTCTATTCTTTTGATTTATAAGGGATTT
TGCCGATTTCGGCCTATTGGTTAAAAAATGAGCTGATTTAACAAAAATTTAACGCGAATTTTAA
CAAAATATTAACGTTTACAATTTCAGGTGGCACTTTTCGGGGAAATGTGCGCGGAACCCCTATT
TGTTTATTTTTCTAAATACATTCAAATATGTATCCGCTCATGAATTAATTCTTAGAAAAACTCAT
CGAGCATCAAATGAAACTGCAATTTATTCATATCAGGATTATCAATACCATATTTTTGAAAAAG
CCGTTTCTGTAATGAAGGAGAAAACTCACCGAGGCAGTTCCATAGGATGGCAAGATCCTGGTA
TCGGTCTGCGATTCCGACTCGTCCAACATCAATACAACCTATTAATTTCCCCTCGTCAAAAATA
AGGTTATCAAGTGAGAAATCACCATGAGTGACGACTGAATCCGGTGAGAATGGCAAAAGTTTA
TGCATTTCTTTCCAGACTTGTTCAACAGGCCAGCCATTACGCTCGTCATCAAAATCACTCGCAT
CAACCAAACCGTTATTCATTCGTGATTGCGCCTGAGCGAGACGAAATACGCGATCGCTGTTAA
AAGGACAATTACAAACAGGAATCGAATGCAACCGGCGCAGGAACACTGCCAGCGCATCAACA
ATATTTTCACCTGAATCAGGATATTCTTCTAATACCTGGAATGCTGTTTTCCCGGGGATCGCAG
TGGTGAGTAACCATGCATCATCAGGAGTACGGATAAAATGCTTGATGGTCGGAAGAGGCATAA
ATTCCGTCAGCCAGTTTAGTCTGACCATCTCATCTGTAACATCATTGGCAACGCTACCTTTGCC
ATGTTTCAGAAACAACTCTGGCGCATCGGGCTTCCCATACAATCGATAGATTGTCGCACCTGAT
TGCCCGACATTATCGCGAGCCCATTTATACCCATATAAATCAGCATCCATGTTGGAATTTAATC
GCGGCCTAGAGCAAGACGTTTCCCGTTGAATATGGCTCATAACACCCCTTGTATTACTGTTTAT
GTAAGCAGACAGTTTTATTGTTCATGACCAAAATCCCTTAACGTGAGTTTTCGTTCCACTGAGC
GTCAGACCCCGTAGAAAAGATCAAAGGATCTTCTTGAGATCCTTTTTTTCTGCGCGTAATCTGC
TGCTTGCAAACAAAAAAACCACCGCTACCAGCGGTGGTTTGTTTGCCGGATCAAGAGCTACCA
ACTCTTTTTCCGAAGGTAACTGGCTTCAGCAGAGCGCAGATACCAAATACTGTCCTTCTAGTGT
AGCCGTAGTTAGGCCACCACTTCAAGAACTCTGTAGCACCGCCTACATACCTCGCTCTGCTAAT
CCTGTTACCAGTGGCTGCTGCCAGTGGCGATAAGTCGTGTCTTACCGGGTTGGACTCAAGACG
ATAGTTACCGGATAAGGCGCAGCGGTCGGGCTGAACGGGGGGTTCGTGCACACAGCCCAGCTT
GGAGCGAACGACCTACACCGAACTGAGATACCTACAGCGTGAGCTATGAGAAAGCGCCACGC
TTCCCGAAGGGAGAAAGGCGGACAGGTATCCGGTAAGCGGCAGGGTCGGAACAGGAGAGCGC
ACGAGGGAGCTTCCAGGGGGAAACGCCTGGTATCTTTATAGTCCTGTCGGGTTTCGCCACCTCT
GACTTGAGCGTCGATTTTTGTGATGCTCGTCAGGGGGGCGGAGCCTATGGAAAAACGCCAGCA
ACGCGGCCTTTTTACGGTTCCTGGCCTTTTGCTGGCCTTTTGCTCACATGTTCTTTCCTGCGTTA
TCCCCTGATTCTGTGGATAACCGTATTACCGCCTTTGAGTGAGCTGATACCGCTCGCCGCAGCC
GAACGACCGAGCGCAGCGAGTCAGTGAGCGAGGAAGCGGAAGAGCGCCTGATGCGGTATTTT
CTCCTTACGCATCTGTGCGGTATTTCACACCGCATATATGGTGCACTCTCAGTACAATCTGCTC
TGATGCCGCATAGTTAAGCCAGTATACACTCCGCTATCGCTACGTGACTGGGTCATGGCTGCGC
CCCGACACCCGCCAACACCCGCTGACGCGCCCTGACGGGCTTGTCTGCTCCCGGCATCCGCTTA
CAGACAAGCTGTGACCGTCTCCGGGAGCTGCATGTGTCAGAGGTTTTCACCGTCATCACCGAA
ACGCGCGAGGCAGCTGCGGTAAAGCTCATCAGCGTGGTCGTGAAGCGATTCACAGATGTCTGC
CTGTTCATCCGCGTCCAGCTCGTTGAGTTTCTCCAGAAGCGTTAATGTCTGGCTTCTGATAAAG
CGGGCCATGTTAAGGGCGGTTTTTTCCTGTTTGGTCACTGATGCCTCCGTGTAAGGGGGATTTC
TGTTCATGGGGGTAATGATACCGATGAAACGAGAGAGGATGCTCACGATACGGGTTACTGATG
ATGAACATGCCCGGTTACTGGAACGTTGTGAGGGTAAACAACTGGCGGTATGGATGCGGCGGG
ACCAGAGAAAAATCACTCAGGGTCAATGCCAGCGCTTCGTTAATACAGATGTAGGTGTTCCAC
AGGGTAGCCAGCAGCATCCTGCGATGCAGATCCGGAACATAATGGTGCAGGGCGCTGACTTCC
GCGTTTCCAGACTTTACGAAACACGGAAACCGAAGACCATTCATGTTGTTGCTCAGGTCGCAG
ACGTTTTGCAGCAGCAGTCGCTTCACGTTCGCTCGCGTATCGGTGATTCATTCTGCTAACCAGT
AAGGCAACCCCGCCAGCCTAGCCGGGTCCTCAACGACAGGAGCACGATCATGCGCACCCGTG
GGGCCGCCATGCCGGCGATAATGGCCTGCTTCTCGCCGAAACGTTTGGTGGCGGGACCAGTGA
CGAAGGCTTGAGCGAGGGCGTGCAAGATTCCGAATACCGCAAGCGACAGGCCGATCATCGTC
GCGCTCCAGCGAAAGCGGTCCTCGCCGAAAATGACCCAGAGCGCTGCCGGCACCTGTCCTACG
AGTTGCATGATAAAGAAGACAGTCATAAGTGCGGCGACGATAGTCATGCCCCGCGCCCACCGG
AAGGAGCTGACTGGGTTGAAGGCTCTCAAGGGCATCGGTCGAGATCCCGGTGCCTAATGAGTG
AGCTAACTTACATTAATTGCGTTGCGCTCACTGCCCGCTTTCCAGTCGGGAAACCTGTCGTGCC
AGCTGCATTAATGAATCGGCCAACGCGCGGGGAGAGGCGGTTTGCGTATTGGGCGCCAGGGTG
GTTTTTCTTTTCACCAGTGAGACGGGCAACAGCTGATTGCCCTTCACCGCCTGGCCCTGAGAGA
GTTGCAGCAAGCGGTCCACGCTGGTTTGCCCCAGCAGGCGAAAATCCTGTTTGATGGTGGTTA
ACGGCGGGATATAACATGAGCTGTCTTCGGTATCGTCGTATCCCACTACCGAGATATCCGCAC
CAACGCGCAGCCCGGACTCGGTAATGGCGCGCATTGCGCCCAGCGCCATCTGATCGTTGGCAA
CCAGCATCGCAGTGGGAACGATGCCCTCATTCAGCATTTGCATGGTTTGTTGAAAACCGGACA
TGGCACTCCAGTCGCCTTCCCGTTCCGCTATCGGCTGAATTTGATTGCGAGTGAGATATTTATG
CCAGCCAGCCAGACGCAGACGCGCCGAGACAGAACTTAATGGGCCCGCTAACAGCGCGATTT
GCTGGTGACCCAATGCGACCAGATGCTCCACGCCCAGTCGCGTACCGTCTTCATGGGAGAAAA
TAATACTGTTGATGGGTGTCTGGTCAGAGACATCAAGAAATAACGCCGGAACATTAGTGCAGG
CAGCTTCCACAGCAATGGCATCCTGGTCATCCAGCGGATAGTTAATGATCAGCCCACTGACGC
GTTGCGCGAGAAGATTGTGCACCGCCGCTTTACAGGCTTCGACGCCGCTTCGTTCTACCATCGA
CACCACCACGCTGGCACCCAGTTGATCGGCGCGAGATTTAATCGCCGCGACAATTTGCGACGG
CGCGTGCAGGGCCAGACTGGAGGTGGCAACGCCAATCAGCAACGACTGTTTGCCCGCCAGTTG
TTGTGCCACGCGGTTGGGAATGTAATTCAGCTCCGCCATCGCCGCTTCCACTTTTTCCCGCGTTT
TCGCAGAAACGTGGCTGGCCTGGTTCACCACGCGGGAAACGGTCTGATAAGAGACACCGGCAT
ACTCTGCGACATCGTATAACGTTACTGGTTTCACATTCACCACCCTGAATTGACTCTCTTCCGG
GCGCTATCATGCCATACCGCGAAAGGTTTTGCGCCATTCGATGGTGTCCGGGATCTCGACGCTC
TCCCTTATGCGACTCCTGCATTAGGAAGCAGCCCAGTAGTAGGTTGAGGCCGTTGAGCACCGC
CGCCGCAAGGAATGGTGCATGCAAGGAGATGGCGCCCAACAGTCCCCCGGCCACGGGGCCTG
CCACCATACCCACGCCGAAACAAGCGCTCATGAGCCCGAAGTGGCGAGCCCGATCTTCCCCAT
CGGTGATGTCGGCGATATAGGCGCCAGCAACCGCACCTGTGGCGCCGGTGATGCCGGCCACGA
TGCGTCCGGCGTAGAGGATCGAGATCTCGATCCCGCGAAATTAATACGACTCACTATAGGGGA
ATTGTGAGCGGATAACAATTCCCCTCTAGAAATAATTTTGTTTAACTTTAAGAAGGAGATATAC
CATGGGCAGCAGCCATCATCATCATCATCACAGCAGCGGCCTGGTGCCGCGCGGCAGCCATAT
GGCTAGTATGGATCTGGATGCAGTAAGGATTAAAGTGGACACAGTAAATGCAAAACCGGGAG
ACACAGTAAATATACCTGTAAGATTCAGTGGTATACCATCCAAGGGAATAGCAAACTGTGACT
TTGTATACAGCTATGACCCGAATGTACTTGAGATAATAGAGATAAAACCGGGAGAATTGATAG
TTGACCCGAATCCTACCAAGAGCTTTGATACTGCAGTATATCCTGACAGAAAGATGATAGTAT
TCCTGTTTGCGGAAGACAGCGGAACAGGAGCGTATGCAATAACTAAAGACGGAGTATTTGCTA
CGATAGTAGCGAAAGTAAAAGAAGGAGCACCTAACGGGCTCAGTGTAATCAAATTTGTAGAA
GTAGGCGGATTTGCGAACAATGACCTTGTAGAACAGAAGACACAGTTCTTTGACGGTGGAGTA
AATGTTGGAGATACAACAGAACCTGCAACACCTACAACACCTGTAACAACACCGACAACAAC
AGATGATCTAGATGCAGCTAGCATGACCGGCCCCACCACCGACGCCGATGCCGCTGTCCCACG
TCGGGTCTTGATCGCGGAAGATGAAGCGCTCATCCGCATGGACCTGGCCGAGATGTTGCGAGA
GGAGGGATATGAAATTGTCGGCGAGGCCGGCGACGGCCAGGAAGCCGTCGAGCTGGCCGAGC
TGCACAAGCCCGACCTGGTGATCATGGACGTGAAGATGCCGCGCCGGGACGGGATCGACGCC
GCATCCGAAATCGCCAGCAAACGTATTGCCCCGATCGTGGTGCTGACCGCGTTCAGCCAGCGT
GATCTGGTCGAACGTGCGCGTGATGCCGGGGCGATGGCATACCTGGTAAAGCCTTTCAGCATC
AGCGACCTGATTCCAGCGATTGAATTGGCGGTCAGCCGGTTCAGGGAGATCACCGCGTTGGAA
GGCGAGGTGGCGACGCTATCTGAACGGTTGGAAACCCGCAAGCTGGTGGAACGAGCAAAAGG
CCTGCTGCAGACCAAACATGGGATGACCGAGCCGGACGCTTTCAAGTGGATTCAACGTGCCGC
CATGGATCGGCGCACCACCATGAAGCGGGTGGCCGAAGTCGTGCTGGAAACCCTCGGAACAC
CCAAAGACACCTGAGCGGCCGCACTCGAGCACCACCACCACCACCACTGAGATCCGGCTGCTA
ACAAAGCCCGAAAGGAAGCTGAGTTGGCTGCTGCCACCGCTGAGCAATAACTAGCATAACCCC
TTGGGGCCTCTAAACGGGTCTTGAGGGGTTTTTTGCTGAAAGGAGGAACTATATCCGGAT
Protein sequence - C1256: Ecoli-pET28[6xHis-Cohesin (underlined)-m.tbRv1626
(M. tb. Antigen - bold)]
(SEQ ID NO: 157)
MGSSHHHHHHSSGLVPRGSHMASMDLDAVRIKVDTVNAKPGDTVNIPVRFSGIPSKGIANC
DFVYSYDPNVLEIIEIKPGELIVDPNPTKSFDTAVYPDRKMIVFLFAEDSGTGAYAITKDGVFATIVA
KVKEGAPNGLSVIKFVEVGGFANNDLVEQKTQFFDGGVNVGDTTEPATPTTPVTTPTTTDDLDAAS
MTGPTTDADAAVPRRVLIAEDEALIRMDLAEMLREEGYEIVGEAGDGQEAVELAELHKPDLV
IMDVKMPRRDGIDAASEIASKRIAPIVVLTAFSQRDLVERARDAGAMAYLVKPFSISDLIPAIEL
AVSRFREITALEGEVATLSERLETRKLVERAKGLLQTKHGMTEPDAFKWIQRAAMDRRTTM
KRVAEVVLETLGTPKDT
Rv3044: C1312: Ecoli-pET28[6xHis-Cohesin (underlined)-m.tbRv3044 (M. tb.
Antigen in bold)]
(SEQ ID NO: 158)
TGGCGAATGGGACGCGCCCTGTAGCGGCGCATTAAGCGCGGCGGGTGTGGTGGTTACG
CGCAGCGTGACCGCTACACTTGCCAGCGCCCTAGCGCCCGCTCCTTTCGCTTTCTTCCCTTCCTT
TCTCGCCACGTTCGCCGGCTTTCCCCGTCAAGCTCTAAATCGGGGGCTCCCTTTAGGGTTCCGA
TTTAGTGCTTTACGGCACCTCGACCCCAAAAAACTTGATTAGGGTGATGGTTCACGTAGTGGGC
CATCGCCCTGATAGACGGTTTTTCGCCCTTTGACGTTGGAGTCCACGTTCTTTAATAGTGGACT
CTTGTTCCAAACTGGAACAACACTCAACCCTATCTCGGTCTATTCTTTTGATTTATAAGGGATTT
TGCCGATTTCGGCCTATTGGTTAAAAAATGAGCTGATTTAACAAAAATTTAACGCGAATTTTAA
CAAAATATTAACGTTTACAATTTCAGGTGGCACTTTTCGGGGAAATGTGCGCGGAACCCCTATT
TGTTTATTTTTCTAAATACATTCAAATATGTATCCGCTCATGAATTAATTCTTAGAAAAACTCAT
CGAGCATCAAATGAAACTGCAATTTATTCATATCAGGATTATCAATACCATATTTTTGAAAAAG
CCGTTTCTGTAATGAAGGAGAAAACTCACCGAGGCAGTTCCATAGGATGGCAAGATCCTGGTA
TCGGTCTGCGATTCCGACTCGTCCAACATCAATACAACCTATTAATTTCCCCTCGTCAAAAATA
AGGTTATCAAGTGAGAAATCACCATGAGTGACGACTGAATCCGGTGAGAATGGCAAAAGTTTA
TGCATTTCTTTCCAGACTTGTTCAACAGGCCAGCCATTACGCTCGTCATCAAAATCACTCGCAT
CAACCAAACCGTTATTCATTCGTGATTGCGCCTGAGCGAGACGAAATACGCGATCGCTGTTAA
AAGGACAATTACAAACAGGAATCGAATGCAACCGGCGCAGGAACACTGCCAGCGCATCAACA
ATATTTTCACCTGAATCAGGATATTCTTCTAATACCTGGAATGCTGTTTTCCCGGGGATCGCAG
TGGTGAGTAACCATGCATCATCAGGAGTACGGATAAAATGCTTGATGGTCGGAAGAGGCATAA
ATTCCGTCAGCCAGTTTAGTCTGACCATCTCATCTGTAACATCATTGGCAACGCTACCTTTGCC
ATGTTTCAGAAACAACTCTGGCGCATCGGGCTTCCCATACAATCGATAGATTGTCGCACCTGAT
TGCCCGACATTATCGCGAGCCCATTTATACCCATATAAATCAGCATCCATGTTGGAATTTAATC
GCGGCCTAGAGCAAGACGTTTCCCGTTGAATATGGCTCATAACACCCCTTGTATTACTGTTTAT
GTAAGCAGACAGTTTTATTGTTCATGACCAAAATCCCTTAACGTGAGTTTTCGTTCCACTGAGC
GTCAGACCCCGTAGAAAAGATCAAAGGATCTTCTTGAGATCCTTTTTTTCTGCGCGTAATCTGC
TGCTTGCAAACAAAAAAACCACCGCTACCAGCGGTGGTTTGTTTGCCGGATCAAGAGCTACCA
ACTCTTTTTCCGAAGGTAACTGGCTTCAGCAGAGCGCAGATACCAAATACTGTCCTTCTAGTGT
AGCCGTAGTTAGGCCACCACTTCAAGAACTCTGTAGCACCGCCTACATACCTCGCTCTGCTAAT
CCTGTTACCAGTGGCTGCTGCCAGTGGCGATAAGTCGTGTCTTACCGGGTTGGACTCAAGACG
ATAGTTACCGGATAAGGCGCAGCGGTCGGGCTGAACGGGGGGTTCGTGCACACAGCCCAGCTT
GGAGCGAACGACCTACACCGAACTGAGATACCTACAGCGTGAGCTATGAGAAAGCGCCACGC
TTCCCGAAGGGAGAAAGGCGGACAGGTATCCGGTAAGCGGCAGGGTCGGAACAGGAGAGCGC
ACGAGGGAGCTTCCAGGGGGAAACGCCTGGTATCTTTATAGTCCTGTCGGGTTTCGCCACCTCT
GACTTGAGCGTCGATTTTTGTGATGCTCGTCAGGGGGGCGGAGCCTATGGAAAAACGCCAGCA
ACGCGGCCTTTTTACGGTTCCTGGCCTTTTGCTGGCCTTTTGCTCACATGTTCTTTCCTGCGTTA
TCCCCTGATTCTGTGGATAACCGTATTACCGCCTTTGAGTGAGCTGATACCGCTCGCCGCAGCC
GAACGACCGAGCGCAGCGAGTCAGTGAGCGAGGAAGCGGAAGAGCGCCTGATGCGGTATTTT
CTCCTTACGCATCTGTGCGGTATTTCACACCGCATATATGGTGCACTCTCAGTACAATCTGCTC
TGATGCCGCATAGTTAAGCCAGTATACACTCCGCTATCGCTACGTGACTGGGTCATGGCTGCGC
CCCGACACCCGCCAACACCCGCTGACGCGCCCTGACGGGCTTGTCTGCTCCCGGCATCCGCTTA
CAGACAAGCTGTGACCGTCTCCGGGAGCTGCATGTGTCAGAGGTTTTCACCGTCATCACCGAA
ACGCGCGAGGCAGCTGCGGTAAAGCTCATCAGCGTGGTCGTGAAGCGATTCACAGATGTCTGC
CTGTTCATCCGCGTCCAGCTCGTTGAGTTTCTCCAGAAGCGTTAATGTCTGGCTTCTGATAAAG
CGGGCCATGTTAAGGGCGGTTTTTTCCTGTTTGGTCACTGATGCCTCCGTGTAAGGGGGATTTC
TGTTCATGGGGGTAATGATACCGATGAAACGAGAGAGGATGCTCACGATACGGGTTACTGATG
ATGAACATGCCCGGTTACTGGAACGTTGTGAGGGTAAACAACTGGCGGTATGGATGCGGCGGG
ACCAGAGAAAAATCACTCAGGGTCAATGCCAGCGCTTCGTTAATACAGATGTAGGTGTTCCAC
AGGGTAGCCAGCAGCATCCTGCGATGCAGATCCGGAACATAATGGTGCAGGGCGCTGACTTCC
GCGTTTCCAGACTTTACGAAACACGGAAACCGAAGACCATTCATGTTGTTGCTCAGGTCGCAG
ACGTTTTGCAGCAGCAGTCGCTTCACGTTCGCTCGCGTATCGGTGATTCATTCTGCTAACCAGT
AAGGCAACCCCGCCAGCCTAGCCGGGTCCTCAACGACAGGAGCACGATCATGCGCACCCGTG
GGGCCGCCATGCCGGCGATAATGGCCTGCTTCTCGCCGAAACGTTTGGTGGCGGGACCAGTGA
CGAAGGCTTGAGCGAGGGCGTGCAAGATTCCGAATACCGCAAGCGACAGGCCGATCATCGTC
GCGCTCCAGCGAAAGCGGTCCTCGCCGAAAATGACCCAGAGCGCTGCCGGCACCTGTCCTACG
AGTTGCATGATAAAGAAGACAGTCATAAGTGCGGCGACGATAGTCATGCCCCGCGCCCACCGG
AAGGAGCTGACTGGGTTGAAGGCTCTCAAGGGCATCGGTCGAGATCCCGGTGCCTAATGAGTG
AGCTAACTTACATTAATTGCGTTGCGCTCACTGCCCGCTTTCCAGTCGGGAAACCTGTCGTGCC
AGCTGCATTAATGAATCGGCCAACGCGCGGGGAGAGGCGGTTTGCGTATTGGGCGCCAGGGTG
GTTTTTCTTTTCACCAGTGAGACGGGCAACAGCTGATTGCCCTTCACCGCCTGGCCCTGAGAGA
GTTGCAGCAAGCGGTCCACGCTGGTTTGCCCCAGCAGGCGAAAATCCTGTTTGATGGTGGTTA
ACGGCGGGATATAACATGAGCTGTCTTCGGTATCGTCGTATCCCACTACCGAGATATCCGCAC
CAACGCGCAGCCCGGACTCGGTAATGGCGCGCATTGCGCCCAGCGCCATCTGATCGTTGGCAA
CCAGCATCGCAGTGGGAACGATGCCCTCATTCAGCATTTGCATGGTTTGTTGAAAACCGGACA
TGGCACTCCAGTCGCCTTCCCGTTCCGCTATCGGCTGAATTTGATTGCGAGTGAGATATTTATG
CCAGCCAGCCAGACGCAGACGCGCCGAGACAGAACTTAATGGGCCCGCTAACAGCGCGATTT
GCTGGTGACCCAATGCGACCAGATGCTCCACGCCCAGTCGCGTACCGTCTTCATGGGAGAAAA
TAATACTGTTGATGGGTGTCTGGTCAGAGACATCAAGAAATAACGCCGGAACATTAGTGCAGG
CAGCTTCCACAGCAATGGCATCCTGGTCATCCAGCGGATAGTTAATGATCAGCCCACTGACGC
GTTGCGCGAGAAGATTGTGCACCGCCGCTTTACAGGCTTCGACGCCGCTTCGTTCTACCATCGA
CACCACCACGCTGGCACCCAGTTGATCGGCGCGAGATTTAATCGCCGCGACAATTTGCGACGG
CGCGTGCAGGGCCAGACTGGAGGTGGCAACGCCAATCAGCAACGACTGTTTGCCCGCCAGTTG
TTGTGCCACGCGGTTGGGAATGTAATTCAGCTCCGCCATCGCCGCTTCCACTTTTTCCCGCGTTT
TCGCAGAAACGTGGCTGGCCTGGTTCACCACGCGGGAAACGGTCTGATAAGAGACACCGGCAT
ACTCTGCGACATCGTATAACGTTACTGGTTTCACATTCACCACCCTGAATTGACTCTCTTCCGG
GCGCTATCATGCCATACCGCGAAAGGTTTTGCGCCATTCGATGGTGTCCGGGATCTCGACGCTC
TCCCTTATGCGACTCCTGCATTAGGAAGCAGCCCAGTAGTAGGTTGAGGCCGTTGAGCACCGC
CGCCGCAAGGAATGGTGCATGCAAGGAGATGGCGCCCAACAGTCCCCCGGCCACGGGGCCTG
CCACCATACCCACGCCGAAACAAGCGCTCATGAGCCCGAAGTGGCGAGCCCGATCTTCCCCAT
CGGTGATGTCGGCGATATAGGCGCCAGCAACCGCACCTGTGGCGCCGGTGATGCCGGCCACGA
TGCGTCCGGCGTAGAGGATCGAGATCTCGATCCCGCGAAATTAATACGACTCACTATAGGGGA
ATTGTGAGCGGATAACAATTCCCCTCTAGAAATAATTTTGTTTAACTTTAAGAAGGAGATATAC
CATGGGCAGCAGCCATCATCATCATCATCACAGCAGCGGCCTGGTGCCGCGCGGCAGCCATAT
GGCTAGTATGGATCTGGATGCAGTAAGGATTAAAGTGGACACAGTAAATGCAAAACCGGGAG
ACACAGTAAATATACCTGTAAGATTCAGTGGTATACCATCCAAGGGAATAGCAAACTGTGACT
TTGTATACAGCTATGACCCGAATGTACTTGAGATAATAGAGATAAAACCGGGAGAATTGATAG
TTGACCCGAATCCTACCAAGAGCTTTGATACTGCAGTATATCCTGACAGAAAGATGATAGTAT
TCCTGTTTGCGGAAGACAGCGGAACAGGAGCGTATGCAATAACTAAAGACGGAGTATTTGCTA
CGATAGTAGCGAAAGTAAAAGAAGGAGCACCTAACGGGCTCAGTGTAATCAAATTTGTAGAA
GTAGGCGGATTTGCGAACAATGACCTTGTAGAACAGAAGACACAGTTCTTTGACGGTGGAGTA
AATGTTGGAGATACAACAGAACCTGCAACACCTACAACACCTGTAACAACACCGACAACAAC
AGATGATCTAGATGCAGCTAGCATGCGATCCACTGTTGCTGTCGCCGTAGCGGCAGCCGT
GATCGCAGCGTCCAGTGGTTGCGGCTCCGATCAACCGGCCCATAAGGCGTCACAATCGA
TGATCACGCCCACCACCCAGATCGCCGGCGCCGGGGTGCTGGGAAACGACAGAAAGCCG
GATGAGTCGTGCGCGCGTGCGGCGGCCGCGGCCGATCCGGGGCCACCGACCCGACCAG
CGCACAATGCGGCGGGAGTCAGCCCGGAGATGGTGCAGGTGCCGGCGGAGGCGCAGCG
CATCGTGGTGCTCTCCGGTGACCAGCTCGACGCGCTGTGCGCGCTGGGCCTGCAATCGC
GGATCGTCGCCGCCGCGTTGCCGAACAGCTCCTCAAGTCAACCTTCCTATCTGGGCACG
ACCGTGCATGATCTGCCCGGTGTCGGTACTCGCAGCGCCCCCGACCTGCGCGCCATTGC
GGCGGCTCACCCGGATCTGATCCTGGGTTCGCAGGGTTTGACGCCGCAGTTGTATCCGC
AGCTGGCGGCGATCGCCCCGACGGTGTTTACCGCGGCACCGGGCGCGGACTGGGAAAAT
AACCTGCGTGGTGTCGGTGCCGCCACGGCCCGTATCGCCGCGGTGGACGCGCTGATCAC
CGGGTTCGCCGAACACGCCACCCAGGTCGGGACCAAGCATGACGCGACCCACTTCCAAG
CGTCGATCGTGCAGCTGACCGCCAACACCATGCGGGTATACGGCGCCAACAACTTCCCG
GCCAGCGTGCTGAGCGCGGTCGGCGTCGACCGACCGCCGTCTCAACGGTTCACCGACAA
GGCCTACATCGAGATCGGCACCACGGCCGCCGACCTGGCGAAATCACCGGACTTCTCGG
CGGCCGACGCCGATATCGTCTACCTGTCGTGCGCGTCGGAAGCAGCCGCGGAACGCGCG
GCCGTCATCCTGGATAGCGACCCATGGCGCAAGCTGTCCGCCAACCGTGACAACCGGGT
CTTCGTCGTCAACGACCAGGTATGGCAGACCGGCGAGGGTATGGTCGCTGCCCGCGGCA
TTGTCGATGATCTGCGCTGGGTCGACGCGCCGATCAACTAGAAGCTTGCGGCCGCACTCG
AGCACCACCACCACCACCACTGAGATCCGGCTGCTAACAAAGCCCGAAAGGAAGCTGAGTTG
GCTGCTGCCACCGCTGAGCAATAACTAGCATAACCCCTTGGGGCCTCTAAACGGGTCTTGAGG
GGTTTTTTGCTGAAAGGAGGAACTATATCCGGAT
Protein sequence - C1312: Ecoli-pET28[6xHis-Cohesin (underlined)-m.tbRv3044
(M. tb. Antigen in bold)]
(SEQ ID NO: 159)
MGSSHHHHHHSSGLVPRGSHMASMDLDAVRIKVDTVNAKPGDTVNIPVRFSGIPSKGIANC
DFVYSYDPNVLEIIEIKPGELIVDPNPTKSFDTAVYPDRKMIVFLFAEDSGTGAYAITKDGVFATIVA
KVKEGAPNGLSVIKFVEVGGFANNDLVEQKTQFFDGGVNVGDTTEPATPTTPVTTPTTTDDLDAAS
MRSTVAVAVAAAVIAASSGCGSDQPAHKASQSMITPTTQIAGAGVLGNDRKPDESCARAAAA
ADPGPPTRPAHNAAGVSPEMVQVPAEAQRIVVLSGDQLDALCALGLQSRIVAAALPNSSSSQP
SYLGTTVHDLPGVGTRSAPDLRAIAAAHPDLILGSQGLTPQLYPQLAAIAPTVFTAAPGADWE
NNLRGVGAATARIAAVDALITGFAEHATQVGTKHDATHFQASIVQLTANTMRVYGANNFPAS
VLSAVGVDRPPSQRFTDKAYIEIGTTAADLAKSPDFSAADADIVYLSCASEAAAERAAVILDSD
PWRKLSANRDNRVFVVNDQVWQTGEGMVAARGIVDDLRWVDAPIN
Ag85 A: C1241: Ecoli-pET28[6xHis-Cohesin (underlined)-m.tbAg85A (M. tb antigen -
bold)]
(SEQ ID NO: 160)
TGGCGAATGGGACGCGCCCTGTAGCGGCGCATTAAGCGCGGCGGGTGTGGTGGTTACG
CGCAGCGTGACCGCTACACTTGCCAGCGCCCTAGCGCCCGCTCCTTTCGCTTTCTTCCCTTCCTT
TCTCGCCACGTTCGCCGGCTTTCCCCGTCAAGCTCTAAATCGGGGGCTCCCTTTAGGGTTCCGA
TTTAGTGCTTTACGGCACCTCGACCCCAAAAAACTTGATTAGGGTGATGGTTCACGTAGTGGGC
CATCGCCCTGATAGACGGTTTTTCGCCCTTTGACGTTGGAGTCCACGTTCTTTAATAGTGGACT
CTTGTTCCAAACTGGAACAACACTCAACCCTATCTCGGTCTATTCTTTTGATTTATAAGGGATTT
TGCCGATTTCGGCCTATTGGTTAAAAAATGAGCTGATTTAACAAAAATTTAACGCGAATTTTAA
CAAAATATTAACGTTTACAATTTCAGGTGGCACTTTTCGGGGAAATGTGCGCGGAACCCCTATT
TGTTTATTTTTCTAAATACATTCAAATATGTATCCGCTCATGAATTAATTCTTAGAAAAACTCAT
CGAGCATCAAATGAAACTGCAATTTATTCATATCAGGATTATCAATACCATATTTTTGAAAAAG
CCGTTTCTGTAATGAAGGAGAAAACTCACCGAGGCAGTTCCATAGGATGGCAAGATCCTGGTA
TCGGTCTGCGATTCCGACTCGTCCAACATCAATACAACCTATTAATTTCCCCTCGTCAAAAATA
AGGTTATCAAGTGAGAAATCACCATGAGTGACGACTGAATCCGGTGAGAATGGCAAAAGTTTA
TGCATTTCTTTCCAGACTTGTTCAACAGGCCAGCCATTACGCTCGTCATCAAAATCACTCGCAT
CAACCAAACCGTTATTCATTCGTGATTGCGCCTGAGCGAGACGAAATACGCGATCGCTGTTAA
AAGGACAATTACAAACAGGAATCGAATGCAACCGGCGCAGGAACACTGCCAGCGCATCAACA
ATATTTTCACCTGAATCAGGATATTCTTCTAATACCTGGAATGCTGTTTTCCCGGGGATCGCAG
TGGTGAGTAACCATGCATCATCAGGAGTACGGATAAAATGCTTGATGGTCGGAAGAGGCATAA
ATTCCGTCAGCCAGTTTAGTCTGACCATCTCATCTGTAACATCATTGGCAACGCTACCTTTGCC
ATGTTTCAGAAACAACTCTGGCGCATCGGGCTTCCCATACAATCGATAGATTGTCGCACCTGAT
TGCCCGACATTATCGCGAGCCCATTTATACCCATATAAATCAGCATCCATGTTGGAATTTAATC
GCGGCCTAGAGCAAGACGTTTCCCGTTGAATATGGCTCATAACACCCCTTGTATTACTGTTTAT
GTAAGCAGACAGTTTTATTGTTCATGACCAAAATCCCTTAACGTGAGTTTTCGTTCCACTGAGC
GTCAGACCCCGTAGAAAAGATCAAAGGATCTTCTTGAGATCCTTTTTTTCTGCGCGTAATCTGC
TGCTTGCAAACAAAAAAACCACCGCTACCAGCGGTGGTTTGTTTGCCGGATCAAGAGCTACCA
ACTCTTTTTCCGAAGGTAACTGGCTTCAGCAGAGCGCAGATACCAAATACTGTCCTTCTAGTGT
AGCCGTAGTTAGGCCACCACTTCAAGAACTCTGTAGCACCGCCTACATACCTCGCTCTGCTAAT
CCTGTTACCAGTGGCTGCTGCCAGTGGCGATAAGTCGTGTCTTACCGGGTTGGACTCAAGACG
ATAGTTACCGGATAAGGCGCAGCGGTCGGGCTGAACGGGGGGTTCGTGCACACAGCCCAGCTT
GGAGCGAACGACCTACACCGAACTGAGATACCTACAGCGTGAGCTATGAGAAAGCGCCACGC
TTCCCGAAGGGAGAAAGGCGGACAGGTATCCGGTAAGCGGCAGGGTCGGAACAGGAGAGCGC
ACGAGGGAGCTTCCAGGGGGAAACGCCTGGTATCTTTATAGTCCTGTCGGGTTTCGCCACCTCT
GACTTGAGCGTCGATTTTTGTGATGCTCGTCAGGGGGGCGGAGCCTATGGAAAAACGCCAGCA
ACGCGGCCTTTTTACGGTTCCTGGCCTTTTGCTGGCCTTTTGCTCACATGTTCTTTCCTGCGTTA
TCCCCTGATTCTGTGGATAACCGTATTACCGCCTTTGAGTGAGCTGATACCGCTCGCCGCAGCC
GAACGACCGAGCGCAGCGAGTCAGTGAGCGAGGAAGCGGAAGAGCGCCTGATGCGGTATTTT
CTCCTTACGCATCTGTGCGGTATTTCACACCGCATATATGGTGCACTCTCAGTACAATCTGCTC
TGATGCCGCATAGTTAAGCCAGTATACACTCCGCTATCGCTACGTGACTGGGTCATGGCTGCGC
CCCGACACCCGCCAACACCCGCTGACGCGCCCTGACGGGCTTGTCTGCTCCCGGCATCCGCTTA
CAGACAAGCTGTGACCGTCTCCGGGAGCTGCATGTGTCAGAGGTTTTCACCGTCATCACCGAA
ACGCGCGAGGCAGCTGCGGTAAAGCTCATCAGCGTGGTCGTGAAGCGATTCACAGATGTCTGC
CTGTTCATCCGCGTCCAGCTCGTTGAGTTTCTCCAGAAGCGTTAATGTCTGGCTTCTGATAAAG
CGGGCCATGTTAAGGGCGGTTTTTTCCTGTTTGGTCACTGATGCCTCCGTGTAAGGGGGATTTC
TGTTCATGGGGGTAATGATACCGATGAAACGAGAGAGGATGCTCACGATACGGGTTACTGATG
ATGAACATGCCCGGTTACTGGAACGTTGTGAGGGTAAACAACTGGCGGTATGGATGCGGCGGG
ACCAGAGAAAAATCACTCAGGGTCAATGCCAGCGCTTCGTTAATACAGATGTAGGTGTTCCAC
AGGGTAGCCAGCAGCATCCTGCGATGCAGATCCGGAACATAATGGTGCAGGGCGCTGACTTCC
GCGTTTCCAGACTTTACGAAACACGGAAACCGAAGACCATTCATGTTGTTGCTCAGGTCGCAG
ACGTTTTGCAGCAGCAGTCGCTTCACGTTCGCTCGCGTATCGGTGATTCATTCTGCTAACCAGT
AAGGCAACCCCGCCAGCCTAGCCGGGTCCTCAACGACAGGAGCACGATCATGCGCACCCGTG
GGGCCGCCATGCCGGCGATAATGGCCTGCTTCTCGCCGAAACGTTTGGTGGCGGGACCAGTGA
CGAAGGCTTGAGCGAGGGCGTGCAAGATTCCGAATACCGCAAGCGACAGGCCGATCATCGTC
GCGCTCCAGCGAAAGCGGTCCTCGCCGAAAATGACCCAGAGCGCTGCCGGCACCTGTCCTACG
AGTTGCATGATAAAGAAGACAGTCATAAGTGCGGCGACGATAGTCATGCCCCGCGCCCACCGG
AAGGAGCTGACTGGGTTGAAGGCTCTCAAGGGCATCGGTCGAGATCCCGGTGCCTAATGAGTG
AGCTAACTTACATTAATTGCGTTGCGCTCACTGCCCGCTTTCCAGTCGGGAAACCTGTCGTGCC
AGCTGCATTAATGAATCGGCCAACGCGCGGGGAGAGGCGGTTTGCGTATTGGGCGCCAGGGTG
GTTTTTCTTTTCACCAGTGAGACGGGCAACAGCTGATTGCCCTTCACCGCCTGGCCCTGAGAGA
GTTGCAGCAAGCGGTCCACGCTGGTTTGCCCCAGCAGGCGAAAATCCTGTTTGATGGTGGTTA
ACGGCGGGATATAACATGAGCTGTCTTCGGTATCGTCGTATCCCACTACCGAGATATCCGCAC
CAACGCGCAGCCCGGACTCGGTAATGGCGCGCATTGCGCCCAGCGCCATCTGATCGTTGGCAA
CCAGCATCGCAGTGGGAACGATGCCCTCATTCAGCATTTGCATGGTTTGTTGAAAACCGGACA
TGGCACTCCAGTCGCCTTCCCGTTCCGCTATCGGCTGAATTTGATTGCGAGTGAGATATTTATG
CCAGCCAGCCAGACGCAGACGCGCCGAGACAGAACTTAATGGGCCCGCTAACAGCGCGATTT
GCTGGTGACCCAATGCGACCAGATGCTCCACGCCCAGTCGCGTACCGTCTTCATGGGAGAAAA
TAATACTGTTGATGGGTGTCTGGTCAGAGACATCAAGAAATAACGCCGGAACATTAGTGCAGG
CAGCTTCCACAGCAATGGCATCCTGGTCATCCAGCGGATAGTTAATGATCAGCCCACTGACGC
GTTGCGCGAGAAGATTGTGCACCGCCGCTTTACAGGCTTCGACGCCGCTTCGTTCTACCATCGA
CACCACCACGCTGGCACCCAGTTGATCGGCGCGAGATTTAATCGCCGCGACAATTTGCGACGG
CGCGTGCAGGGCCAGACTGGAGGTGGCAACGCCAATCAGCAACGACTGTTTGCCCGCCAGTTG
TTGTGCCACGCGGTTGGGAATGTAATTCAGCTCCGCCATCGCCGCTTCCACTTTTTCCCGCGTTT
TCGCAGAAACGTGGCTGGCCTGGTTCACCACGCGGGAAACGGTCTGATAAGAGACACCGGCAT
ACTCTGCGACATCGTATAACGTTACTGGTTTCACATTCACCACCCTGAATTGACTCTCTTCCGG
GCGCTATCATGCCATACCGCGAAAGGTTTTGCGCCATTCGATGGTGTCCGGGATCTCGACGCTC
TCCCTTATGCGACTCCTGCATTAGGAAGCAGCCCAGTAGTAGGTTGAGGCCGTTGAGCACCGC
CGCCGCAAGGAATGGTGCATGCAAGGAGATGGCGCCCAACAGTCCCCCGGCCACGGGGCCTG
CCACCATACCCACGCCGAAACAAGCGCTCATGAGCCCGAAGTGGCGAGCCCGATCTTCCCCAT
CGGTGATGTCGGCGATATAGGCGCCAGCAACCGCACCTGTGGCGCCGGTGATGCCGGCCACGA
TGCGTCCGGCGTAGAGGATCGAGATCTCGATCCCGCGAAATTAATACGACTCACTATAGGGGA
ATTGTGAGCGGATAACAATTCCCCTCTAGAAATAATTTTGTTTAACTTTAAGAAGGAGATATAC
CATGGGCAGCAGCCATCATCATCATCATCACAGCAGCGGCCTGGTGCCGCGCGGCAGCCATAT
GGCTAGTATGGATCTGGATGCAGTAAGGATTAAAGTGGACACAGTAAATGCAAAACCGGGAG
ACACAGTAAATATACCTGTAAGATTCAGTGGTATACCATCCAAGGGAATAGCAAACTGTGACT
TTGTATACAGCTATGACCCGAATGTACTTGAGATAATAGAGATAAAACCGGGAGAATTGATAG
TTGACCCGAATCCTACCAAGAGCTTTGATACTGCAGTATATCCTGACAGAAAGATGATAGTAT
TCCTGTTTGCGGAAGACAGCGGAACAGGAGCGTATGCAATAACTAAAGACGGAGTATTTGCTA
CGATAGTAGCGAAAGTAAAAGAAGGAGCACCTAACGGGCTCAGTGTAATCAAATTTGTAGAA
GTAGGCGGATTTGCGAACAATGACCTTGTAGAACAGAAGACACAGTTCTTTGACGGTGGAGTA
AATGTTGGAGATACAACAGAACCTGCAACACCTACAACACCTGTAACAACACCGACAACAAC
AGATGATCTAGATGCAGCTAGCATGCAGCTTGTTGACAGGGTTCGTGGCGCCGTCACGGG
TATGTCGCGTCGACTCGTGGTCGGGGCCGTCGGCGCGGCCCTAGTGTCGGGTCTGGTCG
GCGCCGTCGGTGGCACGGCGACCGCGGGGGCATTTTCCCGGCCGGGCTTGCCGGTGGA
GTACCTGCAGGTGCCGTCGCCGTCGATGGGCCGTGACATCAAGGTCCAATTCCAAAGTG
GTGGTGCCAACTCGCCCGCCCTGTACCTGCTCGACGGCCTGCGCGCGCAGGACGACTTC
AGCGGCTGGGACATCAACACCCCGGCGTTCGAGTGGTACGACCAGTCGGGCCTGTCGGT
GGTCATGCCGGTGGGTGGCCAGTCAAGCTTCTACTCCGACTGGTACCAGCCCGCCTGCG
GCAAGGCCGGTTGCCAGACTTACAAGTGGGAGACCTTCCTGACCAGCGAGCTGCCGGGG
TGGCTGCAGGCCAACAGGCACGTCAAGCCCACCGGAAGCGCCGTCGTCGGTCTTTCGAT
GGCTGCTTCTTCGGCGCTGACGCTGGCGATCTATCACCCCCAGCAGTTCGTCTACGCGG
GAGCGATGTCGGGCCTGTTGGACCCCTCCCAGGCGATGGGTCCCACCCTGATCGGCCTG
GCGATGGGTGACGCTGGCGGCTACAAGGCCTCCGACATGTGGGGCCCGAAGGAGGACC
CGGCGTGGCAGCGCAACGACCCGCTGTTGAACGTCGGGAAGCTGATCGCCAACAACACC
CGCGTCTGGGTGTACTGCGGCAACGGCAAGCCGTCGGATCTGGGTGGCAACAACCTGCC
GGCCAAGTTCCTCGAGGGCTTCGTGCGGACCAGCAACATCAAGTTCCAAGACGCCTACA
ACGCCGGTGGCGGCCACAACGGCGTGTTCGACTTCCCGGACAGCGGTACGCACAGCTGG
GAGTACTGGGGCGCGCAGCTCAACGCTATGAAGCCCGACCTGCAACGGGCACTGGGTGC
CACGCCCAACACCGGGCCCGCGCCCCAGGGCGCCTAGGCGGCCGCACTCGAGCACCACCA
CCACCACCACTGAGATCCGGCTGCTAACAAAGCCCGAAAGGAAGCTGAGTTGGCTGCTGCCAC
CGCTGAGCAATAACTAGCATAACCCCTTGGGGCCTCTAAACGGGTCTTGAGGGGTTTTTTGCTG
AAAGGAGGAACTATATCCGGAT
Protein sequence - Ecoli-pET28[6xHis-Cohesin (underlined)-m.tbAg85A (M. tb
antigen - bold)].
(SEQ ID NO: 161)
MGSSHHHHHHSSGLVPRGSHMASMDLDAVRIKVDTVNAKPGDTVNIPVRFSGIPSKGIANC
DFVYSYDPNVLEIIEIKPGELIVDPNPTKSFDTAVYPDRKMIVFLFAEDSGTGAYAITKDGVFATIVA
KVKEGAPNGLSVIKFVEVGGFANNDLVEQKTQFFDGGVNVGDTTEPATPTTPVTTPTTTDDLDAAS
MQLVDRVRGAVTGMSRRLVVGAVGAALVSGLVGAVGGTATAGAFSRPGLPVEYLQVPSPSM
GRDIKVQFQSGGANSPALYLLDGLRAQDDFSGWDINTPAFEWYDQSGLSVVMPVGGQSSFYS
DWYQPACGKAGCQTYKWETFLTSELPGWLQANRHVKPTGSAVVGLSMAASSALTLAIYHPQ
QFVYAGAMSGLLDPSQAMGPTLIGLAMGDAGGYKASDMWGPKEDPAWQRNDPLLNVGKLI
ANNTRVWVYCGNGKPSDLGGNNLPAKFLEGFVRTSNIKFQDAYNAGGGHNGVFDFPDSGTH
SWEYWGAQLNAMKPDLQRALGATPNTGPAPQGA
Rv1860: C2342: Ecoli-pET28[6xHis-Cohesin (bold)-m.tbRv1860 (m. tb.Antigen - bold)].
(SEQ ID NO: 162)
TGGCGAATGGGACGCGCCCTGTAGCGGCGCATTAAGCGCGGCGGGTGTGGTGGTTACG
CGCAGCGTGACCGCTACACTTGCCAGCGCCCTAGCGCCCGCTCCTTTCGCTTTCTTCCCTTCCTT
TCTCGCCACGTTCGCCGGCTTTCCCCGTCAAGCTCTAAATCGGGGGCTCCCTTTAGGGTTCCGA
TTTAGTGCTTTACGGCACCTCGACCCCAAAAAACTTGATTAGGGTGATGGTTCACGTAGTGGGC
CATCGCCCTGATAGACGGTTTTTCGCCCTTTGACGTTGGAGTCCACGTTCTTTAATAGTGGACT
CTTGTTCCAAACTGGAACAACACTCAACCCTATCTCGGTCTATTCTTTTGATTTATAAGGGATTT
TGCCGATTTCGGCCTATTGGTTAAAAAATGAGCTGATTTAACAAAAATTTAACGCGAATTTTAA
CAAAATATTAACGTTTACAATTTCAGGTGGCACTTTTCGGGGAAATGTGCGCGGAACCCCTATT
TGTTTATTTTTCTAAATACATTCAAATATGTATCCGCTCATGAATTAATTCTTAGAAAAACTCAT
CGAGCATCAAATGAAACTGCAATTTATTCATATCAGGATTATCAATACCATATTTTTGAAAAAG
CCGTTTCTGTAATGAAGGAGAAAACTCACCGAGGCAGTTCCATAGGATGGCAAGATCCTGGTA
TCGGTCTGCGATTCCGACTCGTCCAACATCAATACAACCTATTAATTTCCCCTCGTCAAAAATA
AGGTTATCAAGTGAGAAATCACCATGAGTGACGACTGAATCCGGTGAGAATGGCAAAAGTTTA
TGCATTTCTTTCCAGACTTGTTCAACAGGCCAGCCATTACGCTCGTCATCAAAATCACTCGCAT
CAACCAAACCGTTATTCATTCGTGATTGCGCCTGAGCGAGACGAAATACGCGATCGCTGTTAA
AAGGACAATTACAAACAGGAATCGAATGCAACCGGCGCAGGAACACTGCCAGCGCATCAACA
ATATTTTCACCTGAATCAGGATATTCTTCTAATACCTGGAATGCTGTTTTCCCGGGGATCGCAG
TGGTGAGTAACCATGCATCATCAGGAGTACGGATAAAATGCTTGATGGTCGGAAGAGGCATAA
ATTCCGTCAGCCAGTTTAGTCTGACCATCTCATCTGTAACATCATTGGCAACGCTACCTTTGCC
ATGTTTCAGAAACAACTCTGGCGCATCGGGCTTCCCATACAATCGATAGATTGTCGCACCTGAT
TGCCCGACATTATCGCGAGCCCATTTATACCCATATAAATCAGCATCCATGTTGGAATTTAATC
GCGGCCTAGAGCAAGACGTTTCCCGTTGAATATGGCTCATAACACCCCTTGTATTACTGTTTAT
GTAAGCAGACAGTTTTATTGTTCATGACCAAAATCCCTTAACGTGAGTTTTCGTTCCACTGAGC
GTCAGACCCCGTAGAAAAGATCAAAGGATCTTCTTGAGATCCTTTTTTTCTGCGCGTAATCTGC
TGCTTGCAAACAAAAAAACCACCGCTACCAGCGGTGGTTTGTTTGCCGGATCAAGAGCTACCA
ACTCTTTTTCCGAAGGTAACTGGCTTCAGCAGAGCGCAGATACCAAATACTGTCCTTCTAGTGT
AGCCGTAGTTAGGCCACCACTTCAAGAACTCTGTAGCACCGCCTACATACCTCGCTCTGCTAAT
CCTGTTACCAGTGGCTGCTGCCAGTGGCGATAAGTCGTGTCTTACCGGGTTGGACTCAAGACG
ATAGTTACCGGATAAGGCGCAGCGGTCGGGCTGAACGGGGGGTTCGTGCACACAGCCCAGCTT
GGAGCGAACGACCTACACCGAACTGAGATACCTACAGCGTGAGCTATGAGAAAGCGCCACGC
TTCCCGAAGGGAGAAAGGCGGACAGGTATCCGGTAAGCGGCAGGGTCGGAACAGGAGAGCGC
ACGAGGGAGCTTCCAGGGGGAAACGCCTGGTATCTTTATAGTCCTGTCGGGTTTCGCCACCTCT
GACTTGAGCGTCGATTTTTGTGATGCTCGTCAGGGGGGCGGAGCCTATGGAAAAACGCCAGCA
ACGCGGCCTTTTTACGGTTCCTGGCCTTTTGCTGGCCTTTTGCTCACATGTTCTTTCCTGCGTTA
TCCCCTGATTCTGTGGATAACCGTATTACCGCCTTTGAGTGAGCTGATACCGCTCGCCGCAGCC
GAACGACCGAGCGCAGCGAGTCAGTGAGCGAGGAAGCGGAAGAGCGCCTGATGCGGTATTTT
CTCCTTACGCATCTGTGCGGTATTTCACACCGCATATATGGTGCACTCTCAGTACAATCTGCTC
TGATGCCGCATAGTTAAGCCAGTATACACTCCGCTATCGCTACGTGACTGGGTCATGGCTGCGC
CCCGACACCCGCCAACACCCGCTGACGCGCCCTGACGGGCTTGTCTGCTCCCGGCATCCGCTTA
CAGACAAGCTGTGACCGTCTCCGGGAGCTGCATGTGTCAGAGGTTTTCACCGTCATCACCGAA
ACGCGCGAGGCAGCTGCGGTAAAGCTCATCAGCGTGGTCGTGAAGCGATTCACAGATGTCTGC
CTGTTCATCCGCGTCCAGCTCGTTGAGTTTCTCCAGAAGCGTTAATGTCTGGCTTCTGATAAAG
CGGGCCATGTTAAGGGCGGTTTTTTCCTGTTTGGTCACTGATGCCTCCGTGTAAGGGGGATTTC
TGTTCATGGGGGTAATGATACCGATGAAACGAGAGAGGATGCTCACGATACGGGTTACTGATG
ATGAACATGCCCGGTTACTGGAACGTTGTGAGGGTAAACAACTGGCGGTATGGATGCGGCGGG
ACCAGAGAAAAATCACTCAGGGTCAATGCCAGCGCTTCGTTAATACAGATGTAGGTGTTCCAC
AGGGTAGCCAGCAGCATCCTGCGATGCAGATCCGGAACATAATGGTGCAGGGCGCTGACTTCC
GCGTTTCCAGACTTTACGAAACACGGAAACCGAAGACCATTCATGTTGTTGCTCAGGTCGCAG
ACGTTTTGCAGCAGCAGTCGCTTCACGTTCGCTCGCGTATCGGTGATTCATTCTGCTAACCAGT
AAGGCAACCCCGCCAGCCTAGCCGGGTCCTCAACGACAGGAGCACGATCATGCGCACCCGTG
GGGCCGCCATGCCGGCGATAATGGCCTGCTTCTCGCCGAAACGTTTGGTGGCGGGACCAGTGA
CGAAGGCTTGAGCGAGGGCGTGCAAGATTCCGAATACCGCAAGCGACAGGCCGATCATCGTC
GCGCTCCAGCGAAAGCGGTCCTCGCCGAAAATGACCCAGAGCGCTGCCGGCACCTGTCCTACG
AGTTGCATGATAAAGAAGACAGTCATAAGTGCGGCGACGATAGTCATGCCCCGCGCCCACCGG
AAGGAGCTGACTGGGTTGAAGGCTCTCAAGGGCATCGGTCGAGATCCCGGTGCCTAATGAGTG
AGCTAACTTACATTAATTGCGTTGCGCTCACTGCCCGCTTTCCAGTCGGGAAACCTGTCGTGCC
AGCTGCATTAATGAATCGGCCAACGCGCGGGGAGAGGCGGTTTGCGTATTGGGCGCCAGGGTG
GTTTTTCTTTTCACCAGTGAGACGGGCAACAGCTGATTGCCCTTCACCGCCTGGCCCTGAGAGA
GTTGCAGCAAGCGGTCCACGCTGGTTTGCCCCAGCAGGCGAAAATCCTGTTTGATGGTGGTTA
ACGGCGGGATATAACATGAGCTGTCTTCGGTATCGTCGTATCCCACTACCGAGATATCCGCAC
CAACGCGCAGCCCGGACTCGGTAATGGCGCGCATTGCGCCCAGCGCCATCTGATCGTTGGCAA
CCAGCATCGCAGTGGGAACGATGCCCTCATTCAGCATTTGCATGGTTTGTTGAAAACCGGACA
TGGCACTCCAGTCGCCTTCCCGTTCCGCTATCGGCTGAATTTGATTGCGAGTGAGATATTTATG
CCAGCCAGCCAGACGCAGACGCGCCGAGACAGAACTTAATGGGCCCGCTAACAGCGCGATTT
GCTGGTGACCCAATGCGACCAGATGCTCCACGCCCAGTCGCGTACCGTCTTCATGGGAGAAAA
TAATACTGTTGATGGGTGTCTGGTCAGAGACATCAAGAAATAACGCCGGAACATTAGTGCAGG
CAGCTTCCACAGCAATGGCATCCTGGTCATCCAGCGGATAGTTAATGATCAGCCCACTGACGC
GTTGCGCGAGAAGATTGTGCACCGCCGCTTTACAGGCTTCGACGCCGCTTCGTTCTACCATCGA
CACCACCACGCTGGCACCCAGTTGATCGGCGCGAGATTTAATCGCCGCGACAATTTGCGACGG
CGCGTGCAGGGCCAGACTGGAGGTGGCAACGCCAATCAGCAACGACTGTTTGCCCGCCAGTTG
TTGTGCCACGCGGTTGGGAATGTAATTCAGCTCCGCCATCGCCGCTTCCACTTTTTCCCGCGTTT
TCGCAGAAACGTGGCTGGCCTGGTTCACCACGCGGGAAACGGTCTGATAAGAGACACCGGCAT
ACTCTGCGACATCGTATAACGTTACTGGTTTCACATTCACCACCCTGAATTGACTCTCTTCCGG
GCGCTATCATGCCATACCGCGAAAGGTTTTGCGCCATTCGATGGTGTCCGGGATCTCGACGCTC
TCCCTTATGCGACTCCTGCATTAGGAAGCAGCCCAGTAGTAGGTTGAGGCCGTTGAGCACCGC
CGCCGCAAGGAATGGTGCATGCAAGGAGATGGCGCCCAACAGTCCCCCGGCCACGGGGCCTG
CCACCATACCCACGCCGAAACAAGCGCTCATGAGCCCGAAGTGGCGAGCCCGATCTTCCCCAT
CGGTGATGTCGGCGATATAGGCGCCAGCAACCGCACCTGTGGCGCCGGTGATGCCGGCCACGA
TGCGTCCGGCGTAGAGGATCGAGATCTCGATCCCGCGAAATTAATACGACTCACTATAGGGGA
ATTGTGAGCGGATAACAATTCCCCTCTAGAAATAATTTTGTTTAACTTTAAGAAGGAGATATAC
CATGGGCAGCAGCCATCATCATCATCATCACAGCAGCGGCCTGGTGCCGCGCGGCAGCCATAT
GGCTAGTATGGATCTGGATGCAGTAAGGATTAAAGTGGACACAGTAAATGCAAAACCGGGAG
ACACAGTAAATATACCTGTAAGATTCAGTGGTATACCATCCAAGGGAATAGCAAACTGTGACT
TTGTATACAGCTATGACCCGAATGTACTTGAGATAATAGAGATAAAACCGGGAGAATTGATAG
TTGACCCGAATCCTACCAAGAGCTTTGATACTGCAGTATATCCTGACAGAAAGATGATAGTAT
TCCTGTTTGCGGAAGACAGCGGAACAGGAGCGTATGCAATAACTAAAGACGGAGTATTTGCTA
CGATAGTAGCGAAAGTAAAAGAAGGAGCACCTAACGGGCTCAGTGTAATCAAATTTGTAGAA
GTAGGCGGATTTGCGAACAATGACCTTGTAGAACAGAAGACACAGTTCTTTGACGGTGGAGTA
AATGTTGGAGATACAACAGAACCTGCAACACCTACAACACCTGTAACAACACCGACAACAAC
AGATGATCTAGATGCAGCTAGC [symbol] CAAGGGACG
ATTGGCGGCACTGGCTATCGCGGCGATGGCCAGCGCCAGCCTGGTGACCGTTGCGGTGC
CCGCGACCGCCAACGCCGATCCGGAGCCAGCGCCCCCGGTACCCACAACGGCCGCCTCG
CCGCCGTCGACCGCTGCAGCGCCACCCGCACCGGCGACACCTGTTGCCCCCCCACCACC
GGCCGCCGCCAACACGCCGAATGCCCAGCCGGGCGATCCCAACGCAGCACCTCCGCCGG
CCGACCCGAACGCACCGCCGCCACCTGTCATTGCCCCAAACGCACCCCAACCTGTCCGG
ATCGACAACCCGGTTGGAGGATTCAGCTTCGCGCTGCCTGCTGGCTGGGTGGAGTCTGA
CGCCGCCCACTTCGACTACGGTTCAGCACTCCTCAGCAAAACCACCGGGGACCCGCCAT
TTCCCGGACAGCCGCCGCCGGTGGCCAATGACACCCGTATCGTGCTCGGCCGGCTAGAC
CAAAAGCTTTACGCCAGCGCCGAAGCCACCGACTCCAAGGCCGCGGCCCGGTTGGGCTC
GGACATGGGTGAGTTCTATATGCCCTACCCGGGCACCCGGATCAACCAGGAAACCGTCT
CGCTCGACGCCAACGGGGTGTCTGGAAGCGCGTCGTATTACGAAGTCAAGTTCAGCGAT
CCGAGTAAGCCGAACGGCCAGATCTGGACGGGCGTAATCGGCTCGCCCGCGGCGAACGC
ACCGGACGCCGGGCCCCCTCAGCGCTGGTTTGTGGTATGGCTCGGGACCGCCAACAACC
CGGTGGACAAGGGCGCGGCCAAGGCGCTGGCCGAATCGATCCGGCCTTTGGTCGCCCCG
CCGCCGGCGCCGGCACCGGCTCCTGCAGAGCCCGCTCCGGCGCCGGCGCCGGCCGGGG
AAGTCGCTCCTACCCCGACGACACCGACACCGCAGCGGACCTTACCGGCCGAATTCTGAG
CGGCCGCACTCGAGCACCACCACCACCACCACTGAGATCCGGCTGCTAACAAAGCCCGAAAG
GAAGCTGAGTTGGCTGCTGCCACCGCTGAGCAATAACTAGCATAACCCCTTGGGGCCTCTAAA
CGGGTCTTGAGGGGTTTTTTGCTGAAAGGAGGAACTATATCCGGAT
Protein sequence - C2342: Ecoli-pET28[6xHis-Cohesin (bold) -m.tbRv1860 (m. tb.
Antigen - bold)].
(SEQ ID NO: 163)
MGSSHHHHHHSSGLVPRGSHMASMDLDAVRIKVDTVNAKPGDTVNIPVRFSGIPSKGIANC
DFVYSYDPNVLEIIEIKPGELIVDPNPTKSFDTAVYPDRKMIVFLFAEDSGTGAYAITKDGVFATIVA
KVKEGAPNGLSVIKFVEVGGFANNDLVEQKTQFFDGGVNVGDTTEPATPTTPVTTPTTTDDLDAAS
MHQVDPNLTRRKGRLAALAIAAMASASLVTVAVPATANADPEPAPPVPTTAASPPSTAAAPPA
PATPVAPPPPAAANTPNAQPGDPNAAPPPADPNAPPPPVIAPNAPQPVRIDNPVGGFSFALPAG
WVESDAAHFDYGSALLSKTTGDPPFPGQPPPVANDTRIVLGRLDQKLYASAEATDSKAAARL
GSDMGEFYMPYPGTRINQETVSLDANGVSGSASYYEVKFSDPSKPNGQIWTGVIGSPAANAPD
AGPPQRWFVVWLGTANNPVDKGAAKALAESIRPLVAPPPAPAPAPAEPAPAPAPAGEVAPTP
TTPTPQRTLPA
Rv3812: C1255: Ecoli-pET28[6xHis-Cohesin (underlined)-m.tbRv3812 (M. tb.
Antigen - bold)].
(SEQ ID NO: 164)
TGGCGAATGGGACGCGCCCTGTAGCGGCGCATTAAGCGCGGCGGGTGTGGTGGTTACG
CGCAGCGTGACCGCTACACTTGCCAGCGCCCTAGCGCCCGCTCCTTTCGCTTTCTTCCCTTCCTT
TCTCGCCACGTTCGCCGGCTTTCCCCGTCAAGCTCTAAATCGGGGGCTCCCTTTAGGGTTCCGA
TTTAGTGCTTTACGGCACCTCGACCCCAAAAAACTTGATTAGGGTGATGGTTCACGTAGTGGGC
CATCGCCCTGATAGACGGTTTTTCGCCCTTTGACGTTGGAGTCCACGTTCTTTAATAGTGGACT
CTTGTTCCAAACTGGAACAACACTCAACCCTATCTCGGTCTATTCTTTTGATTTATAAGGGATTT
TGCCGATTTCGGCCTATTGGTTAAAAAATGAGCTGATTTAACAAAAATTTAACGCGAATTTTAA
CAAAATATTAACGTTTACAATTTCAGGTGGCACTTTTCGGGGAAATGTGCGCGGAACCCCTATT
TGTTTATTTTTCTAAATACATTCAAATATGTATCCGCTCATGAATTAATTCTTAGAAAAACTCAT
CGAGCATCAAATGAAACTGCAATTTATTCATATCAGGATTATCAATACCATATTTTTGAAAAAG
CCGTTTCTGTAATGAAGGAGAAAACTCACCGAGGCAGTTCCATAGGATGGCAAGATCCTGGTA
TCGGTCTGCGATTCCGACTCGTCCAACATCAATACAACCTATTAATTTCCCCTCGTCAAAAATA
AGGTTATCAAGTGAGAAATCACCATGAGTGACGACTGAATCCGGTGAGAATGGCAAAAGTTTA
TGCATTTCTTTCCAGACTTGTTCAACAGGCCAGCCATTACGCTCGTCATCAAAATCACTCGCAT
CAACCAAACCGTTATTCATTCGTGATTGCGCCTGAGCGAGACGAAATACGCGATCGCTGTTAA
AAGGACAATTACAAACAGGAATCGAATGCAACCGGCGCAGGAACACTGCCAGCGCATCAACA
ATATTTTCACCTGAATCAGGATATTCTTCTAATACCTGGAATGCTGTTTTCCCGGGGATCGCAG
TGGTGAGTAACCATGCATCATCAGGAGTACGGATAAAATGCTTGATGGTCGGAAGAGGCATAA
ATTCCGTCAGCCAGTTTAGTCTGACCATCTCATCTGTAACATCATTGGCAACGCTACCTTTGCC
ATGTTTCAGAAACAACTCTGGCGCATCGGGCTTCCCATACAATCGATAGATTGTCGCACCTGAT
TGCCCGACATTATCGCGAGCCCATTTATACCCATATAAATCAGCATCCATGTTGGAATTTAATC
GCGGCCTAGAGCAAGACGTTTCCCGTTGAATATGGCTCATAACACCCCTTGTATTACTGTTTAT
GTAAGCAGACAGTTTTATTGTTCATGACCAAAATCCCTTAACGTGAGTTTTCGTTCCACTGAGC
GTCAGACCCCGTAGAAAAGATCAAAGGATCTTCTTGAGATCCTTTTTTTCTGCGCGTAATCTGC
TGCTTGCAAACAAAAAAACCACCGCTACCAGCGGTGGTTTGTTTGCCGGATCAAGAGCTACCA
ACTCTTTTTCCGAAGGTAACTGGCTTCAGCAGAGCGCAGATACCAAATACTGTCCTTCTAGTGT
AGCCGTAGTTAGGCCACCACTTCAAGAACTCTGTAGCACCGCCTACATACCTCGCTCTGCTAAT
CCTGTTACCAGTGGCTGCTGCCAGTGGCGATAAGTCGTGTCTTACCGGGTTGGACTCAAGACG
ATAGTTACCGGATAAGGCGCAGCGGTCGGGCTGAACGGGGGGTTCGTGCACACAGCCCAGCTT
GGAGCGAACGACCTACACCGAACTGAGATACCTACAGCGTGAGCTATGAGAAAGCGCCACGC
TTCCCGAAGGGAGAAAGGCGGACAGGTATCCGGTAAGCGGCAGGGTCGGAACAGGAGAGCGC
ACGAGGGAGCTTCCAGGGGGAAACGCCTGGTATCTTTATAGTCCTGTCGGGTTTCGCCACCTCT
GACTTGAGCGTCGATTTTTGTGATGCTCGTCAGGGGGGCGGAGCCTATGGAAAAACGCCAGCA
ACGCGGCCTTTTTACGGTTCCTGGCCTTTTGCTGGCCTTTTGCTCACATGTTCTTTCCTGCGTTA
TCCCCTGATTCTGTGGATAACCGTATTACCGCCTTTGAGTGAGCTGATACCGCTCGCCGCAGCC
GAACGACCGAGCGCAGCGAGTCAGTGAGCGAGGAAGCGGAAGAGCGCCTGATGCGGTATTTT
CTCCTTACGCATCTGTGCGGTATTTCACACCGCATATATGGTGCACTCTCAGTACAATCTGCTC
TGATGCCGCATAGTTAAGCCAGTATACACTCCGCTATCGCTACGTGACTGGGTCATGGCTGCGC
CCCGACACCCGCCAACACCCGCTGACGCGCCCTGACGGGCTTGTCTGCTCCCGGCATCCGCTTA
CAGACAAGCTGTGACCGTCTCCGGGAGCTGCATGTGTCAGAGGTTTTCACCGTCATCACCGAA
ACGCGCGAGGCAGCTGCGGTAAAGCTCATCAGCGTGGTCGTGAAGCGATTCACAGATGTCTGC
CTGTTCATCCGCGTCCAGCTCGTTGAGTTTCTCCAGAAGCGTTAATGTCTGGCTTCTGATAAAG
CGGGCCATGTTAAGGGCGGTTTTTTCCTGTTTGGTCACTGATGCCTCCGTGTAAGGGGGATTTC
TGTTCATGGGGGTAATGATACCGATGAAACGAGAGAGGATGCTCACGATACGGGTTACTGATG
ATGAACATGCCCGGTTACTGGAACGTTGTGAGGGTAAACAACTGGCGGTATGGATGCGGCGGG
ACCAGAGAAAAATCACTCAGGGTCAATGCCAGCGCTTCGTTAATACAGATGTAGGTGTTCCAC
AGGGTAGCCAGCAGCATCCTGCGATGCAGATCCGGAACATAATGGTGCAGGGCGCTGACTTCC
GCGTTTCCAGACTTTACGAAACACGGAAACCGAAGACCATTCATGTTGTTGCTCAGGTCGCAG
ACGTTTTGCAGCAGCAGTCGCTTCACGTTCGCTCGCGTATCGGTGATTCATTCTGCTAACCAGT
AAGGCAACCCCGCCAGCCTAGCCGGGTCCTCAACGACAGGAGCACGATCATGCGCACCCGTG
GGGCCGCCATGCCGGCGATAATGGCCTGCTTCTCGCCGAAACGTTTGGTGGCGGGACCAGTGA
CGAAGGCTTGAGCGAGGGCGTGCAAGATTCCGAATACCGCAAGCGACAGGCCGATCATCGTC
GCGCTCCAGCGAAAGCGGTCCTCGCCGAAAATGACCCAGAGCGCTGCCGGCACCTGTCCTACG
AGTTGCATGATAAAGAAGACAGTCATAAGTGCGGCGACGATAGTCATGCCCCGCGCCCACCGG
AAGGAGCTGACTGGGTTGAAGGCTCTCAAGGGCATCGGTCGAGATCCCGGTGCCTAATGAGTG
AGCTAACTTACATTAATTGCGTTGCGCTCACTGCCCGCTTTCCAGTCGGGAAACCTGTCGTGCC
AGCTGCATTAATGAATCGGCCAACGCGCGGGGAGAGGCGGTTTGCGTATTGGGCGCCAGGGTG
GTTTTTCTTTTCACCAGTGAGACGGGCAACAGCTGATTGCCCTTCACCGCCTGGCCCTGAGAGA
GTTGCAGCAAGCGGTCCACGCTGGTTTGCCCCAGCAGGCGAAAATCCTGTTTGATGGTGGTTA
ACGGCGGGATATAACATGAGCTGTCTTCGGTATCGTCGTATCCCACTACCGAGATATCCGCAC
CAACGCGCAGCCCGGACTCGGTAATGGCGCGCATTGCGCCCAGCGCCATCTGATCGTTGGCAA
CCAGCATCGCAGTGGGAACGATGCCCTCATTCAGCATTTGCATGGTTTGTTGAAAACCGGACA
TGGCACTCCAGTCGCCTTCCCGTTCCGCTATCGGCTGAATTTGATTGCGAGTGAGATATTTATG
CCAGCCAGCCAGACGCAGACGCGCCGAGACAGAACTTAATGGGCCCGCTAACAGCGCGATTT
GCTGGTGACCCAATGCGACCAGATGCTCCACGCCCAGTCGCGTACCGTCTTCATGGGAGAAAA
TAATACTGTTGATGGGTGTCTGGTCAGAGACATCAAGAAATAACGCCGGAACATTAGTGCAGG
CAGCTTCCACAGCAATGGCATCCTGGTCATCCAGCGGATAGTTAATGATCAGCCCACTGACGC
GTTGCGCGAGAAGATTGTGCACCGCCGCTTTACAGGCTTCGACGCCGCTTCGTTCTACCATCGA
CACCACCACGCTGGCACCCAGTTGATCGGCGCGAGATTTAATCGCCGCGACAATTTGCGACGG
CGCGTGCAGGGCCAGACTGGAGGTGGCAACGCCAATCAGCAACGACTGTTTGCCCGCCAGTTG
TTGTGCCACGCGGTTGGGAATGTAATTCAGCTCCGCCATCGCCGCTTCCACTTTTTCCCGCGTTT
TCGCAGAAACGTGGCTGGCCTGGTTCACCACGCGGGAAACGGTCTGATAAGAGACACCGGCAT
ACTCTGCGACATCGTATAACGTTACTGGTTTCACATTCACCACCCTGAATTGACTCTCTTCCGG
GCGCTATCATGCCATACCGCGAAAGGTTTTGCGCCATTCGATGGTGTCCGGGATCTCGACGCTC
TCCCTTATGCGACTCCTGCATTAGGAAGCAGCCCAGTAGTAGGTTGAGGCCGTTGAGCACCGC
CGCCGCAAGGAATGGTGCATGCAAGGAGATGGCGCCCAACAGTCCCCCGGCCACGGGGCCTG
CCACCATACCCACGCCGAAACAAGCGCTCATGAGCCCGAAGTGGCGAGCCCGATCTTCCCCAT
CGGTGATGTCGGCGATATAGGCGCCAGCAACCGCACCTGTGGCGCCGGTGATGCCGGCCACGA
TGCGTCCGGCGTAGAGGATCGAGATCTCGATCCCGCGAAATTAATACGACTCACTATAGGGGA
ATTGTGAGCGGATAACAATTCCCCTCTAGAAATAATTTTGTTTAACTTTAAGAAGGAGATATAC
CATGGGCAGCAGCCATCATCATCATCATCACAGCAGCGGCCTGGTGCCGCGCGGCAGCCATAT
GGCTAGTATGGATCTGGATGCAGTAAGGATTAAAGTGGACACAGTAAATGCAAAACCGGGAG
ACACAGTAAATATACCTGTAAGATTCAGTGGTATACCATCCAAGGGAATAGCAAACTGTGACT
TTGTATACAGCTATGACCCGAATGTACTTGAGATAATAGAGATAAAACCGGGAGAATTGATAG
TTGACCCGAATCCTACCAAGAGCTTTGATACTGCAGTATATCCTGACAGAAAGATGATAGTAT
TCCTGTTTGCGGAAGACAGCGGAACAGGAGCGTATGCAATAACTAAAGACGGAGTATTTGCTA
CGATAGTAGCGAAAGTAAAAGAAGGAGCACCTAACGGGCTCAGTGTAATCAAATTTGTAGAA
GTAGGCGGATTTGCGAACAATGACCTTGTAGAACAGAAGACACAGTTCTTTGACGGTGGAGTA
AATGTTGGAGATACAACAGAACCTGCAACACCTACAACACCTGTAACAACACCGACAACAAC
AGATGATCTAGATGCAGCTAGTGTGTCGTTCGTGGTCACAGTGCCGGAGGCCGTGGCGGCTGC
GGCGGGGGATTTGGCGGCCATCGGCTCGACGCTTCGGGAAGCGACCGCTGCGGCGGCGGGCC
CCACGACCGGGCTGGCGGCCGCGGCCGCCGACGACGTGTCGATCGCTGTCTCGCAGCTGTTCG
GCAGGTACGGCCAGGAATTTCAAACCGTGAGCAACCAACTGGCCGCGTTTCATACCGAGTTCG
TACGCACGTTGAACCGCGGCGCGGCGGCGTATCTCAACACCGAAAGCGCTAACGGCGGGCAG
CTGTTCGGTCAGATCGAGGCGGGACAGCGCGCCGTTTCCGCGGCCGCGGCCGCCGCTCCGGGC
GGCGCATACGGCCAACTCGTTGCCAACACGGCCACCAACCTGGAATCCCTCTACGGCGCATGG
TCGGCCAACCCGTTCCCATTCCTCCGCCAGATCATCGCCAACCAGCAGGTTTACTGGCAGCAG
ATCGCCGCGGCGCTCGCCAACGCCGTCCAGAACTTCCCCGCCCTGGTGGCGAATTTGCCAGCG
GCCATCGACGCGGCCGTCCAGCAATTCCTGGCCTTCAACGCGGCGTACTACATCCAACAGATT
ATTAGCTCGCAGATCGGCTTCGCCCAGCTATTCGCCACGACGGTCGGTCAGGGGGTCACCAGC
GTCATTGCCGGGTGGCCCAACCTTGCGGCGGAGCTTCAGCTAGCGTTTCAACAGCTTCTGGTGG
GTGACTACAACGCCGCGGTGGCGAACCTGGGTAAGGCCATGACAAACCTTCTGGTCACCGGGT
TCGACACCAGCGACGTGACGATCGGCACAATGGGCACCACCATTAGTGTCACCGCGAAACCCA
AGCTGCTGGGCCCGCTGGGAGATCTGTTCACCATCATGACCATCCCGGCACAAGAGGCGCAGT
ACTTCACCAACCTGATGCCCCCCTCCATCCTGCGAGACATGTCGCAGAACTTCACCAACGTG
CTCACGACGCTCTCCAACCCGAACATCCAGGCGGTCGCTTCGTTCGATATCGCAACCACC
GCCGGGACTTTGAGCACCTTCTTCGGGGTGCCATTGGTGCTCACTTACGCCACATTGGGT
GCGCCGTTCGCGTCACTGAACGCGATTGCGACGAGCGCGGAAACCATCGAGCAGGCCCT
GTTGGCCGGCAACTACCTAGGGGCGGTGGGTGCGCTTATCGACGCCCCGGCCCACGCGT
TAGACGGCTTCCTCAACAGCGCAACCGTGTTGGATACGCCGATCCTGGTGCCCACGGGG
CTCCCGTCCCCTCTGCCCCCGACGGTCGGGATCACGCTGCACTTGCCTTTCGACGGGATT
CTCGTGCCGCCGCATCCCGTCACCGCGACGATCAGCTTCCCGGGTGCTCCGGTTCCTATT
CCCGGTTTCCCAACCACCGTAACCGTTTTCGGCACACCCTTCATGGGAATGGCTCCGCTG
CTGATCAACTACATTCCCCAACAGCTCGCCCTGGCAATCAAACCGGCGGCTTAGCTCGAG
CACCACCACCACCACCACTGAGATCCGGCTGCTAACAAAGCCCGAAAGGAAGCTGAGTTGGCT
GCTGCCACCGCTGAGCAATAACTAGCATAACCCCTTGGGGCCTCTAAACGGGTCTTGAGGGGT
TTTTTGCTGAAAGGAGGAACTATATCCGGAT
Protein sequence - Ecoli-pET28[6xHis-Cohesin (underlined)-m.tbRv3812 (M. tb.
Antigen - bold)].
(SEQ ID NO: 165)
MGSSHHHHHHSSGLVPRGSHMASMDLDAVRIKVDTVNAKPGDTVNIPVRFSGIPSKGIANC
DFVYSYDPNVLEIIEIKPGELIVDPNPTKSFDTAVYPDRKMIVFLFAEDSGTGAYAITKDGVFATIVA
KVKEGAPNGLSVIKFVEVGGFANNDLVEQKTQFFDGGVNVGDTTEPATPTTPVTTPTTTDDLDAAS
VSFVVTVPEAVAAAAGDLAAIGSTLREATAAAAGPTTGLAAAAADDVSIAVSQLFGRYGQEFQ
TVSNQLAAFHTEFVRTLNRGAAAYLNTESANGGQLFGQIEAGQRAVSAAAAAAPGGAYGQL
VANTATNLESLYGAWSANPFPFLRQIIANQQVYWQQIAAALANAVQNFPALVANLPAAIDAA
VQQFLAFNAAYYIQQIISSQIGFAQLFATTVGQGVTSVIAGWPNLAAELQLAFQQLLVGDYNA
AVANLGKAMTNLLVTGFDTSDVTIGTMGTTISVTAKPKLLGPLGDLFTIMTIPAQEAQYFTNL
MPPSILRDMSQNFTNVLTTLSNPNIQAVASFDIATTAGTLSTFFGVPLVLTYATLGAPFASLNAI
ATSAETIEQALLAGNYLGAVGALIDAPAHALDGFLNSATVLDTPILVPTGLPSPLPPTVGITLH
LPFDGILVPPHPVTATISFPGAPVPIPGFPTTVTVFGTPFMGMAPLLINYIPQQLALAIKPAA
Rv3878: C2343: Ecoli-pET28[6xHis-Cohesin (underlined)-m.tbRv3878 (M. tb.
Antigen - bold)].
(SEQ ID NO: 166)
TGGCGAATGGGACGCGCCCTGTAGCGGCGCATTAAGCGCGGCGGGTGTGGTGGTTACG
CGCAGCGTGACCGCTACACTTGCCAGCGCCCTAGCGCCCGCTCCTTTCGCTTTCTTCCCTTCCTT
TCTCGCCACGTTCGCCGGCTTTCCCCGTCAAGCTCTAAATCGGGGGCTCCCTTTAGGGTTCCGA
TTTAGTGCTTTACGGCACCTCGACCCCAAAAAACTTGATTAGGGTGATGGTTCACGTAGTGGGC
CATCGCCCTGATAGACGGTTTTTCGCCCTTTGACGTTGGAGTCCACGTTCTTTAATAGTGGACT
CTTGTTCCAAACTGGAACAACACTCAACCCTATCTCGGTCTATTCTTTTGATTTATAAGGGATTT
TGCCGATTTCGGCCTATTGGTTAAAAAATGAGCTGATTTAACAAAAATTTAACGCGAATTTTAA
CAAAATATTAACGTTTACAATTTCAGGTGGCACTTTTCGGGGAAATGTGCGCGGAACCCCTATT
TGTTTATTTTTCTAAATACATTCAAATATGTATCCGCTCATGAATTAATTCTTAGAAAAACTCAT
CGAGCATCAAATGAAACTGCAATTTATTCATATCAGGATTATCAATACCATATTTTTGAAAAAG
CCGTTTCTGTAATGAAGGAGAAAACTCACCGAGGCAGTTCCATAGGATGGCAAGATCCTGGTA
TCGGTCTGCGATTCCGACTCGTCCAACATCAATACAACCTATTAATTTCCCCTCGTCAAAAATA
AGGTTATCAAGTGAGAAATCACCATGAGTGACGACTGAATCCGGTGAGAATGGCAAAAGTTTA
TGCATTTCTTTCCAGACTTGTTCAACAGGCCAGCCATTACGCTCGTCATCAAAATCACTCGCAT
CAACCAAACCGTTATTCATTCGTGATTGCGCCTGAGCGAGACGAAATACGCGATCGCTGTTAA
AAGGACAATTACAAACAGGAATCGAATGCAACCGGCGCAGGAACACTGCCAGCGCATCAACA
ATATTTTCACCTGAATCAGGATATTCTTCTAATACCTGGAATGCTGTTTTCCCGGGGATCGCAG
TGGTGAGTAACCATGCATCATCAGGAGTACGGATAAAATGCTTGATGGTCGGAAGAGGCATAA
ATTCCGTCAGCCAGTTTAGTCTGACCATCTCATCTGTAACATCATTGGCAACGCTACCTTTGCC
ATGTTTCAGAAACAACTCTGGCGCATCGGGCTTCCCATACAATCGATAGATTGTCGCACCTGAT
TGCCCGACATTATCGCGAGCCCATTTATACCCATATAAATCAGCATCCATGTTGGAATTTAATC
GCGGCCTAGAGCAAGACGTTTCCCGTTGAATATGGCTCATAACACCCCTTGTATTACTGTTTAT
GTAAGCAGACAGTTTTATTGTTCATGACCAAAATCCCTTAACGTGAGTTTTCGTTCCACTGAGC
GTCAGACCCCGTAGAAAAGATCAAAGGATCTTCTTGAGATCCTTTTTTTCTGCGCGTAATCTGC
TGCTTGCAAACAAAAAAACCACCGCTACCAGCGGTGGTTTGTTTGCCGGATCAAGAGCTACCA
ACTCTTTTTCCGAAGGTAACTGGCTTCAGCAGAGCGCAGATACCAAATACTGTCCTTCTAGTGT
AGCCGTAGTTAGGCCACCACTTCAAGAACTCTGTAGCACCGCCTACATACCTCGCTCTGCTAAT
CCTGTTACCAGTGGCTGCTGCCAGTGGCGATAAGTCGTGTCTTACCGGGTTGGACTCAAGACG
ATAGTTACCGGATAAGGCGCAGCGGTCGGGCTGAACGGGGGGTTCGTGCACACAGCCCAGCTT
GGAGCGAACGACCTACACCGAACTGAGATACCTACAGCGTGAGCTATGAGAAAGCGCCACGC
TTCCCGAAGGGAGAAAGGCGGACAGGTATCCGGTAAGCGGCAGGGTCGGAACAGGAGAGCGC
ACGAGGGAGCTTCCAGGGGGAAACGCCTGGTATCTTTATAGTCCTGTCGGGTTTCGCCACCTCT
GACTTGAGCGTCGATTTTTGTGATGCTCGTCAGGGGGGCGGAGCCTATGGAAAAACGCCAGCA
ACGCGGCCTTTTTACGGTTCCTGGCCTTTTGCTGGCCTTTTGCTCACATGTTCTTTCCTGCGTTA
TCCCCTGATTCTGTGGATAACCGTATTACCGCCTTTGAGTGAGCTGATACCGCTCGCCGCAGCC
GAACGACCGAGCGCAGCGAGTCAGTGAGCGAGGAAGCGGAAGAGCGCCTGATGCGGTATTTT
CTCCTTACGCATCTGTGCGGTATTTCACACCGCATATATGGTGCACTCTCAGTACAATCTGCTC
TGATGCCGCATAGTTAAGCCAGTATACACTCCGCTATCGCTACGTGACTGGGTCATGGCTGCGC
CCCGACACCCGCCAACACCCGCTGACGCGCCCTGACGGGCTTGTCTGCTCCCGGCATCCGCTTA
CAGACAAGCTGTGACCGTCTCCGGGAGCTGCATGTGTCAGAGGTTTTCACCGTCATCACCGAA
ACGCGCGAGGCAGCTGCGGTAAAGCTCATCAGCGTGGTCGTGAAGCGATTCACAGATGTCTGC
CTGTTCATCCGCGTCCAGCTCGTTGAGTTTCTCCAGAAGCGTTAATGTCTGGCTTCTGATAAAG
CGGGCCATGTTAAGGGCGGTTTTTTCCTGTTTGGTCACTGATGCCTCCGTGTAAGGGGGATTTC
TGTTCATGGGGGTAATGATACCGATGAAACGAGAGAGGATGCTCACGATACGGGTTACTGATG
ATGAACATGCCCGGTTACTGGAACGTTGTGAGGGTAAACAACTGGCGGTATGGATGCGGCGGG
ACCAGAGAAAAATCACTCAGGGTCAATGCCAGCGCTTCGTTAATACAGATGTAGGTGTTCCAC
AGGGTAGCCAGCAGCATCCTGCGATGCAGATCCGGAACATAATGGTGCAGGGCGCTGACTTCC
GCGTTTCCAGACTTTACGAAACACGGAAACCGAAGACCATTCATGTTGTTGCTCAGGTCGCAG
ACGTTTTGCAGCAGCAGTCGCTTCACGTTCGCTCGCGTATCGGTGATTCATTCTGCTAACCAGT
AAGGCAACCCCGCCAGCCTAGCCGGGTCCTCAACGACAGGAGCACGATCATGCGCACCCGTG
GGGCCGCCATGCCGGCGATAATGGCCTGCTTCTCGCCGAAACGTTTGGTGGCGGGACCAGTGA
CGAAGGCTTGAGCGAGGGCGTGCAAGATTCCGAATACCGCAAGCGACAGGCCGATCATCGTC
GCGCTCCAGCGAAAGCGGTCCTCGCCGAAAATGACCCAGAGCGCTGCCGGCACCTGTCCTACG
AGTTGCATGATAAAGAAGACAGTCATAAGTGCGGCGACGATAGTCATGCCCCGCGCCCACCGG
AAGGAGCTGACTGGGTTGAAGGCTCTCAAGGGCATCGGTCGAGATCCCGGTGCCTAATGAGTG
AGCTAACTTACATTAATTGCGTTGCGCTCACTGCCCGCTTTCCAGTCGGGAAACCTGTCGTGCC
AGCTGCATTAATGAATCGGCCAACGCGCGGGGAGAGGCGGTTTGCGTATTGGGCGCCAGGGTG
GTTTTTCTTTTCACCAGTGAGACGGGCAACAGCTGATTGCCCTTCACCGCCTGGCCCTGAGAGA
GTTGCAGCAAGCGGTCCACGCTGGTTTGCCCCAGCAGGCGAAAATCCTGTTTGATGGTGGTTA
ACGGCGGGATATAACATGAGCTGTCTTCGGTATCGTCGTATCCCACTACCGAGATATCCGCAC
CAACGCGCAGCCCGGACTCGGTAATGGCGCGCATTGCGCCCAGCGCCATCTGATCGTTGGCAA
CCAGCATCGCAGTGGGAACGATGCCCTCATTCAGCATTTGCATGGTTTGTTGAAAACCGGACA
TGGCACTCCAGTCGCCTTCCCGTTCCGCTATCGGCTGAATTTGATTGCGAGTGAGATATTTATG
CCAGCCAGCCAGACGCAGACGCGCCGAGACAGAACTTAATGGGCCCGCTAACAGCGCGATTT
GCTGGTGACCCAATGCGACCAGATGCTCCACGCCCAGTCGCGTACCGTCTTCATGGGAGAAAA
TAATACTGTTGATGGGTGTCTGGTCAGAGACATCAAGAAATAACGCCGGAACATTAGTGCAGG
CAGCTTCCACAGCAATGGCATCCTGGTCATCCAGCGGATAGTTAATGATCAGCCCACTGACGC
GTTGCGCGAGAAGATTGTGCACCGCCGCTTTACAGGCTTCGACGCCGCTTCGTTCTACCATCGA
CACCACCACGCTGGCACCCAGTTGATCGGCGCGAGATTTAATCGCCGCGACAATTTGCGACGG
CGCGTGCAGGGCCAGACTGGAGGTGGCAACGCCAATCAGCAACGACTGTTTGCCCGCCAGTTG
TTGTGCCACGCGGTTGGGAATGTAATTCAGCTCCGCCATCGCCGCTTCCACTTTTTCCCGCGTTT
TCGCAGAAACGTGGCTGGCCTGGTTCACCACGCGGGAAACGGTCTGATAAGAGACACCGGCAT
ACTCTGCGACATCGTATAACGTTACTGGTTTCACATTCACCACCCTGAATTGACTCTCTTCCGG
GCGCTATCATGCCATACCGCGAAAGGTTTTGCGCCATTCGATGGTGTCCGGGATCTCGACGCTC
TCCCTTATGCGACTCCTGCATTAGGAAGCAGCCCAGTAGTAGGTTGAGGCCGTTGAGCACCGC
CGCCGCAAGGAATGGTGCATGCAAGGAGATGGCGCCCAACAGTCCCCCGGCCACGGGGCCTG
CCACCATACCCACGCCGAAACAAGCGCTCATGAGCCCGAAGTGGCGAGCCCGATCTTCCCCAT
CGGTGATGTCGGCGATATAGGCGCCAGCAACCGCACCTGTGGCGCCGGTGATGCCGGCCACGA
TGCGTCCGGCGTAGAGGATCGAGATCTCGATCCCGCGAAATTAATACGACTCACTATAGGGGA
ATTGTGAGCGGATAACAATTCCCCTCTAGAAATAATTTTGTTTAACTTTAAGAAGGAGATATAC
CATGGGCAGCAGCCATCATCATCATCATCACAGCAGCGGCCTGGTGCCGCGCGGCAGCCATAT
GGCTAGTATGGATCTGGATGCAGTAAGGATTAAAGTGGACACAGTAAATGCAAAACCGGGAG
ACACAGTAAATATACCTGTAAGATTCAGTGGTATACCATCCAAGGGAATAGCAAACTGTGACT
TTGTATACAGCTATGACCCGAATGTACTTGAGATAATAGAGATAAAACCGGGAGAATTGATAG
TTGACCCGAATCCTACCAAGAGCTTTGATACTGCAGTATATCCTGACAGAAAGATGATAGTAT
TCCTGTTTGCGGAAGACAGCGGAACAGGAGCGTATGCAATAACTAAAGACGGAGTATTTGCTA
CGATAGTAGCGAAAGTAAAAGAAGGAGCACCTAACGGGCTCAGTGTAATCAAATTTGTAGAA
GTAGGCGGATTTGCGAACAATGACCTTGTAGAACAGAAGACACAGTTCTTTGACGGTGGAGTA
AATGTTGGAGATACAACAGAACCTGCAACACCTACAACACCTGTAACAACACCGACAACAAC
AGATGATCTAGATGCAGCTAGCATGGCTGAACCGTTGGCCGTCGATCCCACCGGCTTGAG
CGCAGCGGCCGCGAAATTGGCCGGCCTCGTTTTTCCGCAGCCTCCGGCGCCGATCGCGG
TCAGCGGAACGGATTCGGTGGTAGCAGCAATCAACGAGACCATGCCAAGCATCGAATCG
CTGGTCAGTGACGGGCTGCCCGGCGTGAAAGCCGCCCTGACTCGAACAGCATCCAACAT
GAACGCGGCGGCGGACGTCTATGCGAAGACCGATCAGTCACTGGGAACCAGTTTGAGCC
AGTATGCATTCGGCTCGTCGGGCGAAGGCCTGGCTGGCGTCGCCTCGGTCGGTGGTCAG
CCAAGTCAGGCTACCCAGCTGCTGAGCACACCCGTGTCACAGGTCACGACCCAGCTCGG
CGAGACGGCCGCTGAGCTGGCACCCCGTGTTGTTGCGACGGTGCCGCAACTCGTTCAGC
TGGCTCCGCACGCCGTTCAGATGTCGCAAAACGCATCCCCCATCGCTCAGACGATCAGTC
AAACCGCCCAACAGGCCGCCCAGAGCGCGCAGGGCGGCAGCGGCCCAATGCCCGCACA
GCTTGCCAGCGCTGAAAAACCGGCCACCGAGCAAGCGGAGCCGGTCCACGAAGTGACAA
ACGACGATCAGGGCGACCAGGGCGACGTGCAGCCGGCCGAGGTCGTTGCCGCGGCACG
TGACGAAGGCGCCGGCGCATCACCGGGCCAGCAGCCCGGCGGGGGCGTTCCCGCGCAA
GCCATGGATACCGGAGCCGGTGCCCGCCCAGCGGCGAGTCCGCTGGCGGCCCCCGTCG
ATCCGTCGACTCCGGCACCCTCAACAACCACAACGTTGGAATTCTAAAAGCTTGCGGCCGC
ACTCGAGCACCACCACCACCACCACTGAGATCCGGCTGCTAACAAAGCCCGAAAGGAAGCTG
AGTTGGCTGCTGCCACCGCTGAGCAATAACTAGCATAACCCCTTGGGGCCTCTAAACGGGTCT
TGAGGGGTTTTTTGCTGAAAGGAGGAACTATATCCGGAT
Protein sequence - Ecoli-pET28[6xHis-Cohesin (underlined) -m.tbRv3878 (M. tb.
Antigen - bold)].
(SEQ ID NO: 167)
MGSSHHHHHHSSGLVPRGSHMASMDLDAVRIKVDTVNAKPGDTVNIPVRFSGIPSKGIANC
DFVYSYDPNVLEIIEIKPGELIVDPNPTKSFDTAVYPDRKMIVFLFAEDSGTGAYAITKDGVFATIVA
KVKEGAPNGLSVIKFVEVGGFANNDLVEQKTQFFDGGVNVGDTTEPATPTTPVTTPTTTDDLDAAS
MAEPLAVDPTGLSAAAAKLAGLVFPQPPAPIAVSGTDSVVAAINETMPSIESLVSDGLPGVKAA
LTRTASNMNAAADVYAKTDQSLGTSLSQYAFGSSGEGLAGVASVGGQPSQATQLLSTPVSQV
TTQLGETAAELAPRVVATVPQLVQLAPHAVQMSQNASPIAQTISQTAQQAAQSAQGGSGPMP
AQLASAEKPATEQAEPVHEVTNDDQGDQGDVQPAEVVAAARDEGAGASPGQQPGGGVPAQ
AMDTGAGARPAASPLAAPVDPSTPAPSTTTTLEF
Rv1837: C2341: Ecoli-pET28[6xHis-Cohesin (underlined) -m.tbRv1837 (M. tb.
antigen - bold)].
(SEQ ID NO: 168)
TGGCGAATGGGACGCGCCCTGTAGCGGCGCATTAAGCGCGGCGGGTGTGGTGGTTACG
CGCAGCGTGACCGCTACACTTGCCAGCGCCCTAGCGCCCGCTCCTTTCGCTTTCTTCCCTTCCTT
TCTCGCCACGTTCGCCGGCTTTCCCCGTCAAGCTCTAAATCGGGGGCTCCCTTTAGGGTTCCGA
TTTAGTGCTTTACGGCACCTCGACCCCAAAAAACTTGATTAGGGTGATGGTTCACGTAGTGGGC
CATCGCCCTGATAGACGGTTTTTCGCCCTTTGACGTTGGAGTCCACGTTCTTTAATAGTGGACT
CTTGTTCCAAACTGGAACAACACTCAACCCTATCTCGGTCTATTCTTTTGATTTATAAGGGATTT
TGCCGATTTCGGCCTATTGGTTAAAAAATGAGCTGATTTAACAAAAATTTAACGCGAATTTTAA
CAAAATATTAACGTTTACAATTTCAGGTGGCACTTTTCGGGGAAATGTGCGCGGAACCCCTATT
TGTTTATTTTTCTAAATACATTCAAATATGTATCCGCTCATGAATTAATTCTTAGAAAAACTCAT
CGAGCATCAAATGAAACTGCAATTTATTCATATCAGGATTATCAATACCATATTTTTGAAAAAG
CCGTTTCTGTAATGAAGGAGAAAACTCACCGAGGCAGTTCCATAGGATGGCAAGATCCTGGTA
TCGGTCTGCGATTCCGACTCGTCCAACATCAATACAACCTATTAATTTCCCCTCGTCAAAAATA
AGGTTATCAAGTGAGAAATCACCATGAGTGACGACTGAATCCGGTGAGAATGGCAAAAGTTTA
TGCATTTCTTTCCAGACTTGTTCAACAGGCCAGCCATTACGCTCGTCATCAAAATCACTCGCAT
CAACCAAACCGTTATTCATTCGTGATTGCGCCTGAGCGAGACGAAATACGCGATCGCTGTTAA
AAGGACAATTACAAACAGGAATCGAATGCAACCGGCGCAGGAACACTGCCAGCGCATCAACA
ATATTTTCACCTGAATCAGGATATTCTTCTAATACCTGGAATGCTGTTTTCCCGGGGATCGCAG
TGGTGAGTAACCATGCATCATCAGGAGTACGGATAAAATGCTTGATGGTCGGAAGAGGCATAA
ATTCCGTCAGCCAGTTTAGTCTGACCATCTCATCTGTAACATCATTGGCAACGCTACCTTTGCC
ATGTTTCAGAAACAACTCTGGCGCATCGGGCTTCCCATACAATCGATAGATTGTCGCACCTGAT
TGCCCGACATTATCGCGAGCCCATTTATACCCATATAAATCAGCATCCATGTTGGAATTTAATC
GCGGCCTAGAGCAAGACGTTTCCCGTTGAATATGGCTCATAACACCCCTTGTATTACTGTTTAT
GTAAGCAGACAGTTTTATTGTTCATGACCAAAATCCCTTAACGTGAGTTTTCGTTCCACTGAGC
GTCAGACCCCGTAGAAAAGATCAAAGGATCTTCTTGAGATCCTTTTTTTCTGCGCGTAATCTGC
TGCTTGCAAACAAAAAAACCACCGCTACCAGCGGTGGTTTGTTTGCCGGATCAAGAGCTACCA
ACTCTTTTTCCGAAGGTAACTGGCTTCAGCAGAGCGCAGATACCAAATACTGTCCTTCTAGTGT
AGCCGTAGTTAGGCCACCACTTCAAGAACTCTGTAGCACCGCCTACATACCTCGCTCTGCTAAT
CCTGTTACCAGTGGCTGCTGCCAGTGGCGATAAGTCGTGTCTTACCGGGTTGGACTCAAGACG
ATAGTTACCGGATAAGGCGCAGCGGTCGGGCTGAACGGGGGGTTCGTGCACACAGCCCAGCTT
GGAGCGAACGACCTACACCGAACTGAGATACCTACAGCGTGAGCTATGAGAAAGCGCCACGC
TTCCCGAAGGGAGAAAGGCGGACAGGTATCCGGTAAGCGGCAGGGTCGGAACAGGAGAGCGC
ACGAGGGAGCTTCCAGGGGGAAACGCCTGGTATCTTTATAGTCCTGTCGGGTTTCGCCACCTCT
GACTTGAGCGTCGATTTTTGTGATGCTCGTCAGGGGGGCGGAGCCTATGGAAAAACGCCAGCA
ACGCGGCCTTTTTACGGTTCCTGGCCTTTTGCTGGCCTTTTGCTCACATGTTCTTTCCTGCGTTA
TCCCCTGATTCTGTGGATAACCGTATTACCGCCTTTGAGTGAGCTGATACCGCTCGCCGCAGCC
GAACGACCGAGCGCAGCGAGTCAGTGAGCGAGGAAGCGGAAGAGCGCCTGATGCGGTATTTT
CTCCTTACGCATCTGTGCGGTATTTCACACCGCATATATGGTGCACTCTCAGTACAATCTGCTC
TGATGCCGCATAGTTAAGCCAGTATACACTCCGCTATCGCTACGTGACTGGGTCATGGCTGCGC
CCCGACACCCGCCAACACCCGCTGACGCGCCCTGACGGGCTTGTCTGCTCCCGGCATCCGCTTA
CAGACAAGCTGTGACCGTCTCCGGGAGCTGCATGTGTCAGAGGTTTTCACCGTCATCACCGAA
ACGCGCGAGGCAGCTGCGGTAAAGCTCATCAGCGTGGTCGTGAAGCGATTCACAGATGTCTGC
CTGTTCATCCGCGTCCAGCTCGTTGAGTTTCTCCAGAAGCGTTAATGTCTGGCTTCTGATAAAG
CGGGCCATGTTAAGGGCGGTTTTTTCCTGTTTGGTCACTGATGCCTCCGTGTAAGGGGGATTTC
TGTTCATGGGGGTAATGATACCGATGAAACGAGAGAGGATGCTCACGATACGGGTTACTGATG
ATGAACATGCCCGGTTACTGGAACGTTGTGAGGGTAAACAACTGGCGGTATGGATGCGGCGGG
ACCAGAGAAAAATCACTCAGGGTCAATGCCAGCGCTTCGTTAATACAGATGTAGGTGTTCCAC
AGGGTAGCCAGCAGCATCCTGCGATGCAGATCCGGAACATAATGGTGCAGGGCGCTGACTTCC
GCGTTTCCAGACTTTACGAAACACGGAAACCGAAGACCATTCATGTTGTTGCTCAGGTCGCAG
ACGTTTTGCAGCAGCAGTCGCTTCACGTTCGCTCGCGTATCGGTGATTCATTCTGCTAACCAGT
AAGGCAACCCCGCCAGCCTAGCCGGGTCCTCAACGACAGGAGCACGATCATGCGCACCCGTG
GGGCCGCCATGCCGGCGATAATGGCCTGCTTCTCGCCGAAACGTTTGGTGGCGGGACCAGTGA
CGAAGGCTTGAGCGAGGGCGTGCAAGATTCCGAATACCGCAAGCGACAGGCCGATCATCGTC
GCGCTCCAGCGAAAGCGGTCCTCGCCGAAAATGACCCAGAGCGCTGCCGGCACCTGTCCTACG
AGTTGCATGATAAAGAAGACAGTCATAAGTGCGGCGACGATAGTCATGCCCCGCGCCCACCGG
AAGGAGCTGACTGGGTTGAAGGCTCTCAAGGGCATCGGTCGAGATCCCGGTGCCTAATGAGTG
AGCTAACTTACATTAATTGCGTTGCGCTCACTGCCCGCTTTCCAGTCGGGAAACCTGTCGTGCC
AGCTGCATTAATGAATCGGCCAACGCGCGGGGAGAGGCGGTTTGCGTATTGGGCGCCAGGGTG
GTTTTTCTTTTCACCAGTGAGACGGGCAACAGCTGATTGCCCTTCACCGCCTGGCCCTGAGAGA
GTTGCAGCAAGCGGTCCACGCTGGTTTGCCCCAGCAGGCGAAAATCCTGTTTGATGGTGGTTA
ACGGCGGGATATAACATGAGCTGTCTTCGGTATCGTCGTATCCCACTACCGAGATATCCGCAC
CAACGCGCAGCCCGGACTCGGTAATGGCGCGCATTGCGCCCAGCGCCATCTGATCGTTGGCAA
CCAGCATCGCAGTGGGAACGATGCCCTCATTCAGCATTTGCATGGTTTGTTGAAAACCGGACA
TGGCACTCCAGTCGCCTTCCCGTTCCGCTATCGGCTGAATTTGATTGCGAGTGAGATATTTATG
CCAGCCAGCCAGACGCAGACGCGCCGAGACAGAACTTAATGGGCCCGCTAACAGCGCGATTT
GCTGGTGACCCAATGCGACCAGATGCTCCACGCCCAGTCGCGTACCGTCTTCATGGGAGAAAA
TAATACTGTTGATGGGTGTCTGGTCAGAGACATCAAGAAATAACGCCGGAACATTAGTGCAGG
CAGCTTCCACAGCAATGGCATCCTGGTCATCCAGCGGATAGTTAATGATCAGCCCACTGACGC
GTTGCGCGAGAAGATTGTGCACCGCCGCTTTACAGGCTTCGACGCCGCTTCGTTCTACCATCGA
CACCACCACGCTGGCACCCAGTTGATCGGCGCGAGATTTAATCGCCGCGACAATTTGCGACGG
CGCGTGCAGGGCCAGACTGGAGGTGGCAACGCCAATCAGCAACGACTGTTTGCCCGCCAGTTG
TTGTGCCACGCGGTTGGGAATGTAATTCAGCTCCGCCATCGCCGCTTCCACTTTTTCCCGCGTTT
TCGCAGAAACGTGGCTGGCCTGGTTCACCACGCGGGAAACGGTCTGATAAGAGACACCGGCAT
ACTCTGCGACATCGTATAACGTTACTGGTTTCACATTCACCACCCTGAATTGACTCTCTTCCGG
GCGCTATCATGCCATACCGCGAAAGGTTTTGCGCCATTCGATGGTGTCCGGGATCTCGACGCTC
TCCCTTATGCGACTCCTGCATTAGGAAGCAGCCCAGTAGTAGGTTGAGGCCGTTGAGCACCGC
CGCCGCAAGGAATGGTGCATGCAAGGAGATGGCGCCCAACAGTCCCCCGGCCACGGGGCCTG
CCACCATACCCACGCCGAAACAAGCGCTCATGAGCCCGAAGTGGCGAGCCCGATCTTCCCCAT
CGGTGATGTCGGCGATATAGGCGCCAGCAACCGCACCTGTGGCGCCGGTGATGCCGGCCACGA
TGCGTCCGGCGTAGAGGATCGAGATCTCGATCCCGCGAAATTAATACGACTCACTATAGGGGA
ATTGTGAGCGGATAACAATTCCCCTCTAGAAATAATTTTGTTTAACTTTAAGAAGGAGATATAC
CATGGGCAGCAGCCATCATCATCATCATCACAGCAGCGGCCTGGTGCCGCGCGGCAGCCATAT
GGCTAGTATGGATCTGGATGCAGTAAGGATTAAAGTGGACACAGTAAATGCAAAACCGGGAG
ACACAGTAAATATACCTGTAAGATTCAGTGGTATACCATCCAAGGGAATAGCAAACTGTGACT
TTGTATACAGCTATGACCCGAATGTACTTGAGATAATAGAGATAAAACCGGGAGAATTGATAG
TTGACCCGAATCCTACCAAGAGCTTTGATACTGCAGTATATCCTGACAGAAAGATGATAGTAT
TCCTGTTTGCGGAAGACAGCGGAACAGGAGCGTATGCAATAACTAAAGACGGAGTATTTGCTA
CGATAGTAGCGAAAGTAAAAGAAGGAGCACCTAACGGGCTCAGTGTAATCAAATTTGTAGAA
GTAGGCGGATTTGCGAACAATGACCTTGTAGAACAGAAGACACAGTTCTTTGACGGTGGAGTA
AATGTTGGAGATACAACAGAACCTGCAACACCTACAACACCTGTAACAACACCGACAACAAC
AGATGATCTAGATGCAGCTAGCATGACAGATCGCGTGTCGGTGGGCAACTTGCGCATCGC
TCGGGTGCTCTACGACTTCGTGAACAATGAAGCCCTGCCTGGCACCGATATCGACCCGG
ACAGCTTCTGGGCGGGCGTCGACAAGGTCGTCGCCGACCTGACCCCGCAGAACCAAGCT
CTGTTGAACGCCCGCGACGAGCTGCAGGCGCAGATCGACAAGTGGCACCGGCGTCGGGT
GATCGAGCCCATCGACATGGATGCCTACCGCCAGTTCCTCACCGAGATCGGCTACCTGCT
TCCCGAACCTGATGACTTCACCATCACCACGTCCGGTGTCGACGCTGAGATCACCACGAC
CGCCGGCCCCCAGCTGGTGGTGCCGGTGCTCAACGCGCGGTTTGCTCTGAACGCGGCCA
ACGCTCGCTGGGGCTCCCTCTACGACGCCTTGTATGGCACCGATGTCATCCCCGAGACC
GACGGCGCCGAAAAAGGCCCCACGTACAACAAGGTTCGTGGCGACAAGGTGATCGCGTA
TGCCCGCAAGTTCCTCGACGACAGTGTTCCGCTGTCGTCGGGTTCCTTTGGCGACGCCAC
CGGTTTCACAGTGCAGGATGGCCAGCTCGTGGTTGCCTTGCCGGATAAGTCCACCGGCC
TGGCCAACCCCGGCCAGTTCGCCGGCTACACCGGCGCAGCCGAGTCGCCGACATCGGTG
CTGCTAATCAATCACGGTTTGCACATCGAGATCCTGATCGATCCGGAGTCGCAGGTCGGC
ACCACCGACCGGGCCGGCGTCAAGGACGTGATCCTGGAATCCGCGATCACCACGATCAT
GGACTTCGAGGACTCGGTGGCCGCCGTGGACGCCGCCGACAAGGTGCTGGGTTATCGGA
ACTGGCTCGGCCTGAACAAGGGCGACCTGGCAGCAGCGGTAGACAAGGACGGCACCGCT
TTCCTGCGGGTGCTCAATAGGGACCGGAACTACACCGCACCCGGCGGTGGCCAGTTCAC
GCTGCCTGGACGCAGCCTCATGTTCGTCCGCAACGTCGGTCACTTGATGACGAATGACG
CCATCGTCGACACTGACGGCAGCGAGGTGTTCGAAGGCATCATGGATGCCCTATTCACC
GGCCTGATCGCCATCCACGGGCTAAAGGCCAGCGACGTCAACGGGCCGCTGATCAACAG
CCGCACCGGCTCCATCTACATCGTCAAGCCGAAGATGCACGGTCCGGCCGAGGTGGCGT
TTACCTGCGAACTGTTCAGCCGGGTTGAAGATGTGCTGGGGTTGCCGCAAAACACCATG
AAGATCGGCATCATGGACGAGGAACGCCGGACCACGGTCAACCTCAAGGCGTGCATCAA
AGCTGCCGCGGACCGCGTGGTGTTCATCAACACCGGGTTCCTGGACCGCACCGGCGATG
AAATCCACACCTCGATGGAGGCCGGCCCGATGGTGCGCAAGGGCACCATGAAGAGCCAG
CCGTGGATCTTGGCCTACGAGGACCACAACGTCGATGCCGGCCTGGCCGCCGGGTTCAG
CGGCCGAGCCCAGGTCGGCAAGGGCATGTGGACAATGACCGAGCTGATGGCCGACATG
GTCGAGACAAAAATCGCCCAGCCGCGCGCCGGGGCCAGCACCGCCTGGGTTCCCTCTCC
CACTGCGGCCACCCTGCATGCGCTGCACTACCACCAGGTCGACGTCGCCGCGGTGCAAC
AAGGACTGGCGGGGAAGCGTCGCGCCACCATCGAACAATTGCTGACCATTCCGCTGGCC
AAGGAATTGGCCTGGGCTCCCGACGAGATCCGCGAAGAGGTCGACAACAACTGTCAATC
CATCCTCGGCTACGTGGTTCGCTGGGTTGATCAAGGTGTCGGCTGCTCGAAGGTGCCCG
ACATCCACGACGTCGCGCTCATGGAGGACCGGGCCACGCTGCGAATCTCCAGCCAATTG
TTGGCCAACTGGCTGCGCCACGGTGTGATCACCAGCGCGGATGTGCGGGCCAGCTTGGA
GCGGATGGCGCCGTTGGTCGATCGACAAAACGCGGGCGACGTGGCATACCGACCGATGG
CACCCAACTTCGACGACAGTATCGCCTTCCTGGCCGCGCAGGAGCTGATCTTGTCCGGG
GCCCAGCAGCCCAACGGCTACACCGAGCCGATCCTGCACCGACGTCGTCGGGAGTTTAA
GGCCCGGGCCGCTGAGAAGCCGGCCCCATCGGACAGGGCCGGTGACGATGCGGCCCGC
GAATTCTAGGCGGCCGCACTCGAGCACCACCACCACCACCACTGAGATCCGGCTGCTAACAAA
GCCCGAAAGGAAGCTGAGTTGGCTGCTGCCACCGCTGAGCAATAACTAGCATAACCCCTTGGG
GCCTCTAAACGGGTCTTGAGGGGTTTTTTGCTGAAAGGAGGAACTATATCCGGAT
Protein sequence - Ecoli-pET28[6xHis-Cohesin (underlined) -m.tbRv1837 (M. tb.
antigen - bold)]
(SEQ ID NO: 169)
MGSSHHHHHHSSGLVPRGSHMASMDLDAVRIKVDTVNAKPGDTVNIPVRFSGIPSKGIANC
DFVYSYDPNVLEIIEIKPGELIVDPNPTKSFDTAVYPDRKMIVFLFAEDSGTGAYAITKDGVFATIVA
KVKEGAPNGLSVIKFVEVGGFANNDLVEQKTQFFDGGVNVGDTTEPATPTTPVTTPTTTDDLDAAS
MTDRVSVGNLRIARVLYDFVNNEALPGTDIDPDSFWAGVDKVVADLTPQNQALLNARDELQA
QIDKWHRRRVIEPIDMDAYRQFLTEIGYLLPEPDDFTITTSGVDAEITTTAGPQLVVPVLNARF
ALNAANARWGSLYDALYGTDVIPETDGAEKGPTYNKVRGDKVIAYARKFLDDSVPLSSGSFG
DATGFTVQDGQLVVALPDKSTGLANPGQFAGYTGAAESPTSVLLINHGLHIEILIDPESQVGTT
DRAGVKDVILESAITTIMDFEDSVAAVDAADKVLGYRNWLGLNKGDLAAAVDKDGTAFLRV
LNRDRNYTAPGGGQFTLPGRSLMFVRNVGHLMTNDAIVDTDGSEVFEGIMDALFTGLIAIHG
LKASDVNGPLINSRTGSIYIVKPKMHGPAEVAFTCELFSRVEDVLGLPQNTMKIGIMDEERRT
TVNLKACIKAAADRVVFINTGFLDRTGDEIHTSMEAGPMVRKGTMKSQPWILAYEDHNVDA
GLAAGFSGRAQVGKGMWTMTELMADMVETKIAQPRAGASTAWVPSPTAATLHALHYHQV
DVAAVQQGLAGKRRATIEQLLTIPLAKELAWAPDEIREEVDNNCQSILGYVVRWVDQGVGCS
KVPDIHDVALMEDRATLRISSQLLANWLRHGVITSADVRASLERMAPLVDRQNAGDVAYRP
MAPNFDDSIAFLAAQELILSGAQQPNGYTEPILHRRRREFKARAAEKPAPSDRAGDDAAR
Rv3803: C2357: Ecoli-pET28 [6xHis-CthermoCohesin (underlined) -m.tbRv3803 (M. tb.
antigen - bold)].
(SEQ ID NO: 170)
TGGCGAATGGGACGCGCCCTGTAGCGGCGCATTAAGCGCGGCGGGTGTGGTGGTTACG
CGCAGCGTGACCGCTACACTTGCCAGCGCCCTAGCGCCCGCTCCTTTCGCTTTCTTCCCTTCCTT
TCTCGCCACGTTCGCCGGCTTTCCCCGTCAAGCTCTAAATCGGGGGCTCCCTTTAGGGTTCCGA
TTTAGTGCTTTACGGCACCTCGACCCCAAAAAACTTGATTAGGGTGATGGTTCACGTAGTGGGC
CATCGCCCTGATAGACGGTTTTTCGCCCTTTGACGTTGGAGTCCACGTTCTTTAATAGTGGACT
CTTGTTCCAAACTGGAACAACACTCAACCCTATCTCGGTCTATTCTTTTGATTTATAAGGGATTT
TGCCGATTTCGGCCTATTGGTTAAAAAATGAGCTGATTTAACAAAAATTTAACGCGAATTTTAA
CAAAATATTAACGTTTACAATTTCAGGTGGCACTTTTCGGGGAAATGTGCGCGGAACCCCTATT
TGTTTATTTTTCTAAATACATTCAAATATGTATCCGCTCATGAATTAATTCTTAGAAAAACTCAT
CGAGCATCAAATGAAACTGCAATTTATTCATATCAGGATTATCAATACCATATTTTTGAAAAAG
CCGTTTCTGTAATGAAGGAGAAAACTCACCGAGGCAGTTCCATAGGATGGCAAGATCCTGGTA
TCGGTCTGCGATTCCGACTCGTCCAACATCAATACAACCTATTAATTTCCCCTCGTCAAAAATA
AGGTTATCAAGTGAGAAATCACCATGAGTGACGACTGAATCCGGTGAGAATGGCAAAAGTTTA
TGCATTTCTTTCCAGACTTGTTCAACAGGCCAGCCATTACGCTCGTCATCAAAATCACTCGCAT
CAACCAAACCGTTATTCATTCGTGATTGCGCCTGAGCGAGACGAAATACGCGATCGCTGTTAA
AAGGACAATTACAAACAGGAATCGAATGCAACCGGCGCAGGAACACTGCCAGCGCATCAACA
ATATTTTCACCTGAATCAGGATATTCTTCTAATACCTGGAATGCTGTTTTCCCGGGGATCGCAG
TGGTGAGTAACCATGCATCATCAGGAGTACGGATAAAATGCTTGATGGTCGGAAGAGGCATAA
ATTCCGTCAGCCAGTTTAGTCTGACCATCTCATCTGTAACATCATTGGCAACGCTACCTTTGCC
ATGTTTCAGAAACAACTCTGGCGCATCGGGCTTCCCATACAATCGATAGATTGTCGCACCTGAT
TGCCCGACATTATCGCGAGCCCATTTATACCCATATAAATCAGCATCCATGTTGGAATTTAATC
GCGGCCTAGAGCAAGACGTTTCCCGTTGAATATGGCTCATAACACCCCTTGTATTACTGTTTAT
GTAAGCAGACAGTTTTATTGTTCATGACCAAAATCCCTTAACGTGAGTTTTCGTTCCACTGAGC
GTCAGACCCCGTAGAAAAGATCAAAGGATCTTCTTGAGATCCTTTTTTTCTGCGCGTAATCTGC
TGCTTGCAAACAAAAAAACCACCGCTACCAGCGGTGGTTTGTTTGCCGGATCAAGAGCTACCA
ACTCTTTTTCCGAAGGTAACTGGCTTCAGCAGAGCGCAGATACCAAATACTGTCCTTCTAGTGT
AGCCGTAGTTAGGCCACCACTTCAAGAACTCTGTAGCACCGCCTACATACCTCGCTCTGCTAAT
CCTGTTACCAGTGGCTGCTGCCAGTGGCGATAAGTCGTGTCTTACCGGGTTGGACTCAAGACG
ATAGTTACCGGATAAGGCGCAGCGGTCGGGCTGAACGGGGGGTTCGTGCACACAGCCCAGCTT
GGAGCGAACGACCTACACCGAACTGAGATACCTACAGCGTGAGCTATGAGAAAGCGCCACGC
TTCCCGAAGGGAGAAAGGCGGACAGGTATCCGGTAAGCGGCAGGGTCGGAACAGGAGAGCGC
ACGAGGGAGCTTCCAGGGGGAAACGCCTGGTATCTTTATAGTCCTGTCGGGTTTCGCCACCTCT
GACTTGAGCGTCGATTTTTGTGATGCTCGTCAGGGGGGCGGAGCCTATGGAAAAACGCCAGCA
ACGCGGCCTTTTTACGGTTCCTGGCCTTTTGCTGGCCTTTTGCTCACATGTTCTTTCCTGCGTTA
TCCCCTGATTCTGTGGATAACCGTATTACCGCCTTTGAGTGAGCTGATACCGCTCGCCGCAGCC
GAACGACCGAGCGCAGCGAGTCAGTGAGCGAGGAAGCGGAAGAGCGCCTGATGCGGTATTTT
CTCCTTACGCATCTGTGCGGTATTTCACACCGCATATATGGTGCACTCTCAGTACAATCTGCTC
TGATGCCGCATAGTTAAGCCAGTATACACTCCGCTATCGCTACGTGACTGGGTCATGGCTGCGC
CCCGACACCCGCCAACACCCGCTGACGCGCCCTGACGGGCTTGTCTGCTCCCGGCATCCGCTTA
CAGACAAGCTGTGACCGTCTCCGGGAGCTGCATGTGTCAGAGGTTTTCACCGTCATCACCGAA
ACGCGCGAGGCAGCTGCGGTAAAGCTCATCAGCGTGGTCGTGAAGCGATTCACAGATGTCTGC
CTGTTCATCCGCGTCCAGCTCGTTGAGTTTCTCCAGAAGCGTTAATGTCTGGCTTCTGATAAAG
CGGGCCATGTTAAGGGCGGTTTTTTCCTGTTTGGTCACTGATGCCTCCGTGTAAGGGGGATTTC
TGTTCATGGGGGTAATGATACCGATGAAACGAGAGAGGATGCTCACGATACGGGTTACTGATG
ATGAACATGCCCGGTTACTGGAACGTTGTGAGGGTAAACAACTGGCGGTATGGATGCGGCGGG
ACCAGAGAAAAATCACTCAGGGTCAATGCCAGCGCTTCGTTAATACAGATGTAGGTGTTCCAC
AGGGTAGCCAGCAGCATCCTGCGATGCAGATCCGGAACATAATGGTGCAGGGCGCTGACTTCC
GCGTTTCCAGACTTTACGAAACACGGAAACCGAAGACCATTCATGTTGTTGCTCAGGTCGCAG
ACGTTTTGCAGCAGCAGTCGCTTCACGTTCGCTCGCGTATCGGTGATTCATTCTGCTAACCAGT
AAGGCAACCCCGCCAGCCTAGCCGGGTCCTCAACGACAGGAGCACGATCATGCGCACCCGTG
GGGCCGCCATGCCGGCGATAATGGCCTGCTTCTCGCCGAAACGTTTGGTGGCGGGACCAGTGA
CGAAGGCTTGAGCGAGGGCGTGCAAGATTCCGAATACCGCAAGCGACAGGCCGATCATCGTC
GCGCTCCAGCGAAAGCGGTCCTCGCCGAAAATGACCCAGAGCGCTGCCGGCACCTGTCCTACG
AGTTGCATGATAAAGAAGACAGTCATAAGTGCGGCGACGATAGTCATGCCCCGCGCCCACCGG
AAGGAGCTGACTGGGTTGAAGGCTCTCAAGGGCATCGGTCGAGATCCCGGTGCCTAATGAGTG
AGCTAACTTACATTAATTGCGTTGCGCTCACTGCCCGCTTTCCAGTCGGGAAACCTGTCGTGCC
AGCTGCATTAATGAATCGGCCAACGCGCGGGGAGAGGCGGTTTGCGTATTGGGCGCCAGGGTG
GTTTTTCTTTTCACCAGTGAGACGGGCAACAGCTGATTGCCCTTCACCGCCTGGCCCTGAGAGA
GTTGCAGCAAGCGGTCCACGCTGGTTTGCCCCAGCAGGCGAAAATCCTGTTTGATGGTGGTTA
ACGGCGGGATATAACATGAGCTGTCTTCGGTATCGTCGTATCCCACTACCGAGATATCCGCAC
CAACGCGCAGCCCGGACTCGGTAATGGCGCGCATTGCGCCCAGCGCCATCTGATCGTTGGCAA
CCAGCATCGCAGTGGGAACGATGCCCTCATTCAGCATTTGCATGGTTTGTTGAAAACCGGACA
TGGCACTCCAGTCGCCTTCCCGTTCCGCTATCGGCTGAATTTGATTGCGAGTGAGATATTTATG
CCAGCCAGCCAGACGCAGACGCGCCGAGACAGAACTTAATGGGCCCGCTAACAGCGCGATTT
GCTGGTGACCCAATGCGACCAGATGCTCCACGCCCAGTCGCGTACCGTCTTCATGGGAGAAAA
TAATACTGTTGATGGGTGTCTGGTCAGAGACATCAAGAAATAACGCCGGAACATTAGTGCAGG
CAGCTTCCACAGCAATGGCATCCTGGTCATCCAGCGGATAGTTAATGATCAGCCCACTGACGC
GTTGCGCGAGAAGATTGTGCACCGCCGCTTTACAGGCTTCGACGCCGCTTCGTTCTACCATCGA
CACCACCACGCTGGCACCCAGTTGATCGGCGCGAGATTTAATCGCCGCGACAATTTGCGACGG
CGCGTGCAGGGCCAGACTGGAGGTGGCAACGCCAATCAGCAACGACTGTTTGCCCGCCAGTTG
TTGTGCCACGCGGTTGGGAATGTAATTCAGCTCCGCCATCGCCGCTTCCACTTTTTCCCGCGTTT
TCGCAGAAACGTGGCTGGCCTGGTTCACCACGCGGGAAACGGTCTGATAAGAGACACCGGCAT
ACTCTGCGACATCGTATAACGTTACTGGTTTCACATTCACCACCCTGAATTGACTCTCTTCCGG
GCGCTATCATGCCATACCGCGAAAGGTTTTGCGCCATTCGATGGTGTCCGGGATCTCGACGCTC
TCCCTTATGCGACTCCTGCATTAGGAAGCAGCCCAGTAGTAGGTTGAGGCCGTTGAGCACCGC
CGCCGCAAGGAATGGTGCATGCAAGGAGATGGCGCCCAACAGTCCCCCGGCCACGGGGCCTG
CCACCATACCCACGCCGAAACAAGCGCTCATGAGCCCGAAGTGGCGAGCCCGATCTTCCCCAT
CGGTGATGTCGGCGATATAGGCGCCAGCAACCGCACCTGTGGCGCCGGTGATGCCGGCCACGA
TGCGTCCGGCGTAGAGGATCGAGATCTCGATCCCGCGAAATTAATACGACTCACTATAGGGGA
ATTGTGAGCGGATAACAATTCCCCTCTAGAAATAATTTTGTTTAACTTTAAGAAGGAGATATAC
CATGGGCAGCAGCCATCATCATCATCATCACAGCAGCGGCCTGGTGCCGCGCGGCAGCCATAT
GGCTAGTATGGATCTGGATGCAGTAAGGATTAAAGTGGACACAGTAAATGCAAAACCGGGAG
ACACAGTAAATATACCTGTAAGATTCAGTGGTATACCATCCAAGGGAATAGCAAACTGTGACT
TTGTATACAGCTATGACCCGAATGTACTTGAGATAATAGAGATAAAACCGGGAGAATTGATAG
TTGACCCGAATCCTACCAAGAGCTTTGATACTGCAGTATATCCTGACAGAAAGATGATAGTAT
TCCTGTTTGCGGAAGACAGCGGAACAGGAGCGTATGCAATAACTAAAGACGGAGTATTTGCTA
CGATAGTAGCGAAAGTAAAAGAAGGAGCACCTAACGGGCTCAGTGTAATCAAATTTGTAGAA
GTAGGCGGATTTGCGAACAATGACCTTGTAGAACAGAAGACACAGTTCTTTGACGGTGGAGTA
AATGTTGGAGATACAACAGAACCTGCAACACCTACAACACCTGTAACAACACCGACAACAAC
AGATGATCTAGATGCAGCTAGCGCGGAACCCACCGCCAAGGCCGCCCCATACGAGAACCTGAT
GGTGCCGTCGCCCTCGATGGGCCGGGACATCCCGGTGGCCTTCCTAGCCGGTGGGCCGCACGC
GGTGTATCTGCTGGACGCCTTCAACGCCGGCCCGGATGTCAGTAACTGGGTCACCGCGGGTAA
CGCGATGAACACGTTGGCGGGCAAGGGGATTTCGGTGGTGGCACCGGCCGGTGGTGCGTACA
GCATGTACACCAACTGGGAGCAGGATGGCAGCAAGCAGTGGGACACCTTCTTGTCCGCTGAGC
TGCCCGACTGGCTGGCCGCTAACCGGGGCTTGGCCCCCGGTGGCCATGCGGCCGTTGGCGCCG
CTCAGGGCGGTTACGGGGCGATGGCGCTGGCGGCCTTCCACCCCGACCGCTTCGGCTTCGCTG
GCTCGATGTCGGGCTTTTTGTACCCGTCGAACACCACCACCAACGGTGCGATCGCGGCGGGCA
TGCAGCAATTCGGCGGTGTGGACACCAACGGAATGTGGGGAGCACCACAGCTGGGTCGGTGG
AAGTGGCACGACCCGTGGGTGCATGCCAGCCTGCTGGCGCAAAACAACACCCGGGTGTGGGT
GTGGAGCCCGACCAACCCGGGAGCCAGCGATCCCGCCGCCATGATCGGCCAAGCCGCCGAGG
CGATGGGTAACAGCCGCATGTTCTACAACCAGTATCGCAGCGTCGGCGGGCACAACGGACACT
TCGACTTCCCAGCCAGCGGTGACAACGGCTGGGGCTCGTGGGCGCCCCAGCTGGGCGCTATGT
CGGGCGATATCGTCGGTGCGATCCGCGAATTCTAAGCGGCCGCACTCGAGCACCACCACCACC
ACCACTGAGATCCGGCTGCTAACAAAGCCCGAAAGGAAGCTGAGTTGGCTGCTGCCACCGCTG
AGCAATAACTAGCATAACCCCTTGGGGCCTCTAAACGGGTCTTGAGGGGTTTTTTGCTGAAAG
GAGGAACTATATCCGGAT
Protein sequence - Ecoli-pET28 [6xHis-CthermoCohesin (underlined) -m.tbRv3803 (M.
tb. antigen - bold)].
(SEQ ID NO: 171)
MGSSHHHHHHSSGLVPRGSHMASMDLDAVRIKVDTVNAKPGDTVNIPVRFSGIPSKGIANC
DFVYSYDPNVLEIIEIKPGELIVDPNPTKSFDTAVYPDRKMIVFLFAEDSGTGAYAITKDGVFATIVA
KVKEGAPNGLSVIKFVEVGGFANNDLVEQKTQFFDGGVNVGDTTEPATPTTPVTTPTTTDDLDAAS
AEPTAKAAPYENLMVPSPSMGRDIPVAFLAGGPHAVYLLDAFNAGPDVSNWVTAGNAMNTL
AGKGISVVAPAGGAYSMYTNWEQDGSKQWDTFLSAELPDWLAANAIAAGMQQFGGVDTNG
MWGAPQLGRWKWHDPWVHASLLAQNNTRVWVWSPTNPGASDPAAMIGQAAEAMGNSRM
FYNQYRSVGGHNGHFDFPASGDNGWGSWAPQLGAMSGDIVGAIREF
HspX: C1253: Ecoli-pET28[6xHis-Cohesin (underlined) -m.tbHspX (M. tb. antigen -
bold)].
(SEQ ID NO: 172)
TGGCGAATGGGACGCGCCCTGTAGCGGCGCATTAAGCGCGGCGGGTGTGGTGGTTACG
CGCAGCGTGACCGCTACACTTGCCAGCGCCCTAGCGCCCGCTCCTTTCGCTTTCTTCCCTTCCTT
TCTCGCCACGTTCGCCGGCTTTCCCCGTCAAGCTCTAAATCGGGGGCTCCCTTTAGGGTTCCGA
TTTAGTGCTTTACGGCACCTCGACCCCAAAAAACTTGATTAGGGTGATGGTTCACGTAGTGGGC
CATCGCCCTGATAGACGGTTTTTCGCCCTTTGACGTTGGAGTCCACGTTCTTTAATAGTGGACT
CTTGTTCCAAACTGGAACAACACTCAACCCTATCTCGGTCTATTCTTTTGATTTATAAGGGATTT
TGCCGATTTCGGCCTATTGGTTAAAAAATGAGCTGATTTAACAAAAATTTAACGCGAATTTTAA
CAAAATATTAACGTTTACAATTTCAGGTGGCACTTTTCGGGGAAATGTGCGCGGAACCCCTATT
TGTTTATTTTTCTAAATACATTCAAATATGTATCCGCTCATGAATTAATTCTTAGAAAAACTCAT
CGAGCATCAAATGAAACTGCAATTTATTCATATCAGGATTATCAATACCATATTTTTGAAAAAG
CCGTTTCTGTAATGAAGGAGAAAACTCACCGAGGCAGTTCCATAGGATGGCAAGATCCTGGTA
TCGGTCTGCGATTCCGACTCGTCCAACATCAATACAACCTATTAATTTCCCCTCGTCAAAAATA
AGGTTATCAAGTGAGAAATCACCATGAGTGACGACTGAATCCGGTGAGAATGGCAAAAGTTTA
TGCATTTCTTTCCAGACTTGTTCAACAGGCCAGCCATTACGCTCGTCATCAAAATCACTCGCAT
CAACCAAACCGTTATTCATTCGTGATTGCGCCTGAGCGAGACGAAATACGCGATCGCTGTTAA
AAGGACAATTACAAACAGGAATCGAATGCAACCGGCGCAGGAACACTGCCAGCGCATCAACA
ATATTTTCACCTGAATCAGGATATTCTTCTAATACCTGGAATGCTGTTTTCCCGGGGATCGCAG
TGGTGAGTAACCATGCATCATCAGGAGTACGGATAAAATGCTTGATGGTCGGAAGAGGCATAA
ATTCCGTCAGCCAGTTTAGTCTGACCATCTCATCTGTAACATCATTGGCAACGCTACCTTTGCC
ATGTTTCAGAAACAACTCTGGCGCATCGGGCTTCCCATACAATCGATAGATTGTCGCACCTGAT
TGCCCGACATTATCGCGAGCCCATTTATACCCATATAAATCAGCATCCATGTTGGAATTTAATC
GCGGCCTAGAGCAAGACGTTTCCCGTTGAATATGGCTCATAACACCCCTTGTATTACTGTTTAT
GTAAGCAGACAGTTTTATTGTTCATGACCAAAATCCCTTAACGTGAGTTTTCGTTCCACTGAGC
GTCAGACCCCGTAGAAAAGATCAAAGGATCTTCTTGAGATCCTTTTTTTCTGCGCGTAATCTGC
TGCTTGCAAACAAAAAAACCACCGCTACCAGCGGTGGTTTGTTTGCCGGATCAAGAGCTACCA
ACTCTTTTTCCGAAGGTAACTGGCTTCAGCAGAGCGCAGATACCAAATACTGTCCTTCTAGTGT
AGCCGTAGTTAGGCCACCACTTCAAGAACTCTGTAGCACCGCCTACATACCTCGCTCTGCTAAT
CCTGTTACCAGTGGCTGCTGCCAGTGGCGATAAGTCGTGTCTTACCGGGTTGGACTCAAGACG
ATAGTTACCGGATAAGGCGCAGCGGTCGGGCTGAACGGGGGGTTCGTGCACACAGCCCAGCTT
GGAGCGAACGACCTACACCGAACTGAGATACCTACAGCGTGAGCTATGAGAAAGCGCCACGC
TTCCCGAAGGGAGAAAGGCGGACAGGTATCCGGTAAGCGGCAGGGTCGGAACAGGAGAGCGC
ACGAGGGAGCTTCCAGGGGGAAACGCCTGGTATCTTTATAGTCCTGTCGGGTTTCGCCACCTCT
GACTTGAGCGTCGATTTTTGTGATGCTCGTCAGGGGGGCGGAGCCTATGGAAAAACGCCAGCA
ACGCGGCCTTTTTACGGTTCCTGGCCTTTTGCTGGCCTTTTGCTCACATGTTCTTTCCTGCGTTA
TCCCCTGATTCTGTGGATAACCGTATTACCGCCTTTGAGTGAGCTGATACCGCTCGCCGCAGCC
GAACGACCGAGCGCAGCGAGTCAGTGAGCGAGGAAGCGGAAGAGCGCCTGATGCGGTATTTT
CTCCTTACGCATCTGTGCGGTATTTCACACCGCATATATGGTGCACTCTCAGTACAATCTGCTC
TGATGCCGCATAGTTAAGCCAGTATACACTCCGCTATCGCTACGTGACTGGGTCATGGCTGCGC
CCCGACACCCGCCAACACCCGCTGACGCGCCCTGACGGGCTTGTCTGCTCCCGGCATCCGCTTA
CAGACAAGCTGTGACCGTCTCCGGGAGCTGCATGTGTCAGAGGTTTTCACCGTCATCACCGAA
ACGCGCGAGGCAGCTGCGGTAAAGCTCATCAGCGTGGTCGTGAAGCGATTCACAGATGTCTGC
CTGTTCATCCGCGTCCAGCTCGTTGAGTTTCTCCAGAAGCGTTAATGTCTGGCTTCTGATAAAG
CGGGCCATGTTAAGGGCGGTTTTTTCCTGTTTGGTCACTGATGCCTCCGTGTAAGGGGGATTTC
TGTTCATGGGGGTAATGATACCGATGAAACGAGAGAGGATGCTCACGATACGGGTTACTGATG
ATGAACATGCCCGGTTACTGGAACGTTGTGAGGGTAAACAACTGGCGGTATGGATGCGGCGGG
ACCAGAGAAAAATCACTCAGGGTCAATGCCAGCGCTTCGTTAATACAGATGTAGGTGTTCCAC
AGGGTAGCCAGCAGCATCCTGCGATGCAGATCCGGAACATAATGGTGCAGGGCGCTGACTTCC
GCGTTTCCAGACTTTACGAAACACGGAAACCGAAGACCATTCATGTTGTTGCTCAGGTCGCAG
ACGTTTTGCAGCAGCAGTCGCTTCACGTTCGCTCGCGTATCGGTGATTCATTCTGCTAACCAGT
AAGGCAACCCCGCCAGCCTAGCCGGGTCCTCAACGACAGGAGCACGATCATGCGCACCCGTG
GGGCCGCCATGCCGGCGATAATGGCCTGCTTCTCGCCGAAACGTTTGGTGGCGGGACCAGTGA
CGAAGGCTTGAGCGAGGGCGTGCAAGATTCCGAATACCGCAAGCGACAGGCCGATCATCGTC
GCGCTCCAGCGAAAGCGGTCCTCGCCGAAAATGACCCAGAGCGCTGCCGGCACCTGTCCTACG
AGTTGCATGATAAAGAAGACAGTCATAAGTGCGGCGACGATAGTCATGCCCCGCGCCCACCGG
AAGGAGCTGACTGGGTTGAAGGCTCTCAAGGGCATCGGTCGAGATCCCGGTGCCTAATGAGTG
AGCTAACTTACATTAATTGCGTTGCGCTCACTGCCCGCTTTCCAGTCGGGAAACCTGTCGTGCC
AGCTGCATTAATGAATCGGCCAACGCGCGGGGAGAGGCGGTTTGCGTATTGGGCGCCAGGGTG
GTTTTTCTTTTCACCAGTGAGACGGGCAACAGCTGATTGCCCTTCACCGCCTGGCCCTGAGAGA
GTTGCAGCAAGCGGTCCACGCTGGTTTGCCCCAGCAGGCGAAAATCCTGTTTGATGGTGGTTA
ACGGCGGGATATAACATGAGCTGTCTTCGGTATCGTCGTATCCCACTACCGAGATATCCGCAC
CAACGCGCAGCCCGGACTCGGTAATGGCGCGCATTGCGCCCAGCGCCATCTGATCGTTGGCAA
CCAGCATCGCAGTGGGAACGATGCCCTCATTCAGCATTTGCATGGTTTGTTGAAAACCGGACA
TGGCACTCCAGTCGCCTTCCCGTTCCGCTATCGGCTGAATTTGATTGCGAGTGAGATATTTATG
CCAGCCAGCCAGACGCAGACGCGCCGAGACAGAACTTAATGGGCCCGCTAACAGCGCGATTT
GCTGGTGACCCAATGCGACCAGATGCTCCACGCCCAGTCGCGTACCGTCTTCATGGGAGAAAA
TAATACTGTTGATGGGTGTCTGGTCAGAGACATCAAGAAATAACGCCGGAACATTAGTGCAGG
CAGCTTCCACAGCAATGGCATCCTGGTCATCCAGCGGATAGTTAATGATCAGCCCACTGACGC
GTTGCGCGAGAAGATTGTGCACCGCCGCTTTACAGGCTTCGACGCCGCTTCGTTCTACCATCGA
CACCACCACGCTGGCACCCAGTTGATCGGCGCGAGATTTAATCGCCGCGACAATTTGCGACGG
CGCGTGCAGGGCCAGACTGGAGGTGGCAACGCCAATCAGCAACGACTGTTTGCCCGCCAGTTG
TTGTGCCACGCGGTTGGGAATGTAATTCAGCTCCGCCATCGCCGCTTCCACTTTTTCCCGCGTTT
TCGCAGAAACGTGGCTGGCCTGGTTCACCACGCGGGAAACGGTCTGATAAGAGACACCGGCAT
ACTCTGCGACATCGTATAACGTTACTGGTTTCACATTCACCACCCTGAATTGACTCTCTTCCGG
GCGCTATCATGCCATACCGCGAAAGGTTTTGCGCCATTCGATGGTGTCCGGGATCTCGACGCTC
TCCCTTATGCGACTCCTGCATTAGGAAGCAGCCCAGTAGTAGGTTGAGGCCGTTGAGCACCGC
CGCCGCAAGGAATGGTGCATGCAAGGAGATGGCGCCCAACAGTCCCCCGGCCACGGGGCCTG
CCACCATACCCACGCCGAAACAAGCGCTCATGAGCCCGAAGTGGCGAGCCCGATCTTCCCCAT
CGGTGATGTCGGCGATATAGGCGCCAGCAACCGCACCTGTGGCGCCGGTGATGCCGGCCACGA
TGCGTCCGGCGTAGAGGATCGAGATCTCGATCCCGCGAAATTAATACGACTCACTATAGGGGA
ATTGTGAGCGGATAACAATTCCCCTCTAGAAATAATTTTGTTTAACTTTAAGAAGGAGATATAC
CATGGGCAGCAGCCATCATCATCATCATCACAGCAGCGGCCTGGTGCCGCGCGGCAGCCATAT
GGCTAGTATGGATCTGGATGCAGTAAGGATTAAAGTGGACACAGTAAATGCAAAACCGGGAG
ACACAGTAAATATACCTGTAAGATTCAGTGGTATACCATCCAAGGGAATAGCAAACTGTGACT
TTGTATACAGCTATGACCCGAATGTACTTGAGATAATAGAGATAAAACCGGGAGAATTGATAG
TTGACCCGAATCCTACCAAGAGCTTTGATACTGCAGTATATCCTGACAGAAAGATGATAGTAT
TCCTGTTTGCGGAAGACAGCGGAACAGGAGCGTATGCAATAACTAAAGACGGAGTATTTGCTA
CGATAGTAGCGAAAGTAAAAGAAGGAGCACCTAACGGGCTCAGTGTAATCAAATTTGTAGAA
GTAGGCGGATTTGCGAACAATGACCTTGTAGAACAGAAGACACAGTTCTTTGACGGTGGAGTA
AATGTTGGAGATACAACAGAACCTGCAACACCTACAACACCTGTAACAACACCGACAACAAC
AGATGATCTAGATGCAGCTAGCATGGCCACCACCCTTCCCGTTCAGCGCCACCCGCGGTCCCTC
TTCCCCGAGTTTTCTGAGCTGTTCGCGGCCTCCCGTCATTCGCCGGACTCCGGCCCACCTTCG
ACACCCGGTTGATGCGGCTGGAAGACGAGATGAAAGAGGGGCGCTACGAGGTACGCGCGGAG
CTTCCCGGGGTCGACCCCGACAAGGACGTCGACATTATGGTCCGCGATGGTCAGCTGACCATC
AAGGCCGAGCGCACCGAGCAGAAGGACTTCGACGGTCGCTCGGAATTCGCGTACGGTTCCTTC
GTTCGCACGGTGTCGCTGCCGGTAGGTGCTGACGAGGACGACATTAAGGCCACCTACGACAAG
GGCATTCTTACTGTGTCGGTGGCGGTTTCGGAAGGGAAGCCAACCGAAAAGCACATTCAGATC
CGGTCCACCAACTGAGCGGCCGCACTCGAGCACCACCACCACCACCACTGAGATCCGGCTGCT
AACAAAGCCCGAAAGGAAGCTGAGTTGGCTGCTGCCACCGCTGAGCAATAACTAGCATAACC
CCTTGGGGCCTCTAAACGGGTCTTGAGGGGTTTTTTGCTGAAAGGAGGAACTATATCCGGAT
Protein sequence - Ecoli - pET28[6xHis-Cohesin (underlined) -m.tbHspX (M. tb.
antigen - bold)].
(SEQ ID NO: 173)
MGSSHHHHHHSSGLVPRGSHMASMDLDAVRIKVDTVNAKPGDTVNIPVRFSGIPSKGIANC
DFVYSYDPNVLEIIEIKPGELIVDPNPTKSFDTAVYPDRKMIVFLFAEDSGTGAYAITKDGVFATIVA
KVKEGAPNGLSVIKFVEVGGFANNDLVEQKTQFFDGGVNVGDTTEPATPTTPVTTPTTTDDLDAAS
MATTLPVQRHPRSLFPEFSELFAAFPSFAGLRPTFDTRLMRLEDEMKEGRYEVRAELPGVDP
DKDVDIMVRDGQLTIKAERTEQKDFDGRSEFAYGSFVRTVSLPVGADEDDIKATYDKGILTVS
VAVSEGKPTEKHIQIRSTN
Rv2875: C1310: Ecoli-pET28[6xHis-Cohesin (underlined) -m.tbRv2875 (M. tb.
antigen - bold)].
(SEQ ID NO: 174)
TGGCGAATGGGACGCGCCCTGTAGCGGCGCATTAAGCGCGGCGGGTGTGGTGGTTACG
CGCAGCGTGACCGCTACACTTGCCAGCGCCCTAGCGCCCGCTCCTTTCGCTTTCTTCCCTTCCTT
TCTCGCCACGTTCGCCGGCTTTCCCCGTCAAGCTCTAAATCGGGGGCTCCCTTTAGGGTTCCGA
TTTAGTGCTTTACGGCACCTCGACCCCAAAAAACTTGATTAGGGTGATGGTTCACGTAGTGGGC
CATCGCCCTGATAGACGGTTTTTCGCCCTTTGACGTTGGAGTCCACGTTCTTTAATAGTGGACT
CTTGTTCCAAACTGGAACAACACTCAACCCTATCTCGGTCTATTCTTTTGATTTATAAGGGATTT
TGCCGATTTCGGCCTATTGGTTAAAAAATGAGCTGATTTAACAAAAATTTAACGCGAATTTTAA
CAAAATATTAACGTTTACAATTTCAGGTGGCACTTTTCGGGGAAATGTGCGCGGAACCCCTATT
TGTTTATTTTTCTAAATACATTCAAATATGTATCCGCTCATGAATTAATTCTTAGAAAAACTCAT
CGAGCATCAAATGAAACTGCAATTTATTCATATCAGGATTATCAATACCATATTTTTGAAAAAG
CCGTTTCTGTAATGAAGGAGAAAACTCACCGAGGCAGTTCCATAGGATGGCAAGATCCTGGTA
TCGGTCTGCGATTCCGACTCGTCCAACATCAATACAACCTATTAATTTCCCCTCGTCAAAAATA
AGGTTATCAAGTGAGAAATCACCATGAGTGACGACTGAATCCGGTGAGAATGGCAAAAGTTTA
TGCATTTCTTTCCAGACTTGTTCAACAGGCCAGCCATTACGCTCGTCATCAAAATCACTCGCAT
CAACCAAACCGTTATTCATTCGTGATTGCGCCTGAGCGAGACGAAATACGCGATCGCTGTTAA
AAGGACAATTACAAACAGGAATCGAATGCAACCGGCGCAGGAACACTGCCAGCGCATCAACA
ATATTTTCACCTGAATCAGGATATTCTTCTAATACCTGGAATGCTGTTTTCCCGGGGATCGCAG
TGGTGAGTAACCATGCATCATCAGGAGTACGGATAAAATGCTTGATGGTCGGAAGAGGCATAA
ATTCCGTCAGCCAGTTTAGTCTGACCATCTCATCTGTAACATCATTGGCAACGCTACCTTTGCC
ATGTTTCAGAAACAACTCTGGCGCATCGGGCTTCCCATACAATCGATAGATTGTCGCACCTGAT
TGCCCGACATTATCGCGAGCCCATTTATACCCATATAAATCAGCATCCATGTTGGAATTTAATC
GCGGCCTAGAGCAAGACGTTTCCCGTTGAATATGGCTCATAACACCCCTTGTATTACTGTTTAT
GTAAGCAGACAGTTTTATTGTTCATGACCAAAATCCCTTAACGTGAGTTTTCGTTCCACTGAGC
GTCAGACCCCGTAGAAAAGATCAAAGGATCTTCTTGAGATCCTTTTTTTCTGCGCGTAATCTGC
TGCTTGCAAACAAAAAAACCACCGCTACCAGCGGTGGTTTGTTTGCCGGATCAAGAGCTACCA
ACTCTTTTTCCGAAGGTAACTGGCTTCAGCAGAGCGCAGATACCAAATACTGTCCTTCTAGTGT
AGCCGTAGTTAGGCCACCACTTCAAGAACTCTGTAGCACCGCCTACATACCTCGCTCTGCTAAT
CCTGTTACCAGTGGCTGCTGCCAGTGGCGATAAGTCGTGTCTTACCGGGTTGGACTCAAGACG
ATAGTTACCGGATAAGGCGCAGCGGTCGGGCTGAACGGGGGGTTCGTGCACACAGCCCAGCTT
GGAGCGAACGACCTACACCGAACTGAGATACCTACAGCGTGAGCTATGAGAAAGCGCCACGC
TTCCCGAAGGGAGAAAGGCGGACAGGTATCCGGTAAGCGGCAGGGTCGGAACAGGAGAGCGC
ACGAGGGAGCTTCCAGGGGGAAACGCCTGGTATCTTTATAGTCCTGTCGGGTTTCGCCACCTCT
GACTTGAGCGTCGATTTTTGTGATGCTCGTCAGGGGGGCGGAGCCTATGGAAAAACGCCAGCA
ACGCGGCCTTTTTACGGTTCCTGGCCTTTTGCTGGCCTTTTGCTCACATGTTCTTTCCTGCGTTA
TCCCCTGATTCTGTGGATAACCGTATTACCGCCTTTGAGTGAGCTGATACCGCTCGCCGCAGCC
GAACGACCGAGCGCAGCGAGTCAGTGAGCGAGGAAGCGGAAGAGCGCCTGATGCGGTATTTT
CTCCTTACGCATCTGTGCGGTATTTCACACCGCATATATGGTGCACTCTCAGTACAATCTGCTC
TGATGCCGCATAGTTAAGCCAGTATACACTCCGCTATCGCTACGTGACTGGGTCATGGCTGCGC
CCCGACACCCGCCAACACCCGCTGACGCGCCCTGACGGGCTTGTCTGCTCCCGGCATCCGCTTA
CAGACAAGCTGTGACCGTCTCCGGGAGCTGCATGTGTCAGAGGTTTTCACCGTCATCACCGAA
ACGCGCGAGGCAGCTGCGGTAAAGCTCATCAGCGTGGTCGTGAAGCGATTCACAGATGTCTGC
CTGTTCATCCGCGTCCAGCTCGTTGAGTTTCTCCAGAAGCGTTAATGTCTGGCTTCTGATAAAG
CGGGCCATGTTAAGGGCGGTTTTTTCCTGTTTGGTCACTGATGCCTCCGTGTAAGGGGGATTTC
TGTTCATGGGGGTAATGATACCGATGAAACGAGAGAGGATGCTCACGATACGGGTTACTGATG
ATGAACATGCCCGGTTACTGGAACGTTGTGAGGGTAAACAACTGGCGGTATGGATGCGGCGGG
ACCAGAGAAAAATCACTCAGGGTCAATGCCAGCGCTTCGTTAATACAGATGTAGGTGTTCCAC
AGGGTAGCCAGCAGCATCCTGCGATGCAGATCCGGAACATAATGGTGCAGGGCGCTGACTTCC
GCGTTTCCAGACTTTACGAAACACGGAAACCGAAGACCATTCATGTTGTTGCTCAGGTCGCAG
ACGTTTTGCAGCAGCAGTCGCTTCACGTTCGCTCGCGTATCGGTGATTCATTCTGCTAACCAGT
AAGGCAACCCCGCCAGCCTAGCCGGGTCCTCAACGACAGGAGCACGATCATGCGCACCCGTG
GGGCCGCCATGCCGGCGATAATGGCCTGCTTCTCGCCGAAACGTTTGGTGGCGGGACCAGTGA
CGAAGGCTTGAGCGAGGGCGTGCAAGATTCCGAATACCGCAAGCGACAGGCCGATCATCGTC
GCGCTCCAGCGAAAGCGGTCCTCGCCGAAAATGACCCAGAGCGCTGCCGGCACCTGTCCTACG
AGTTGCATGATAAAGAAGACAGTCATAAGTGCGGCGACGATAGTCATGCCCCGCGCCCACCGG
AAGGAGCTGACTGGGTTGAAGGCTCTCAAGGGCATCGGTCGAGATCCCGGTGCCTAATGAGTG
AGCTAACTTACATTAATTGCGTTGCGCTCACTGCCCGCTTTCCAGTCGGGAAACCTGTCGTGCC
AGCTGCATTAATGAATCGGCCAACGCGCGGGGAGAGGCGGTTTGCGTATTGGGCGCCAGGGTG
GTTTTTCTTTTCACCAGTGAGACGGGCAACAGCTGATTGCCCTTCACCGCCTGGCCCTGAGAGA
GTTGCAGCAAGCGGTCCACGCTGGTTTGCCCCAGCAGGCGAAAATCCTGTTTGATGGTGGTTA
ACGGCGGGATATAACATGAGCTGTCTTCGGTATCGTCGTATCCCACTACCGAGATATCCGCAC
CAACGCGCAGCCCGGACTCGGTAATGGCGCGCATTGCGCCCAGCGCCATCTGATCGTTGGCAA
CCAGCATCGCAGTGGGAACGATGCCCTCATTCAGCATTTGCATGGTTTGTTGAAAACCGGACA
TGGCACTCCAGTCGCCTTCCCGTTCCGCTATCGGCTGAATTTGATTGCGAGTGAGATATTTATG
CCAGCCAGCCAGACGCAGACGCGCCGAGACAGAACTTAATGGGCCCGCTAACAGCGCGATTT
GCTGGTGACCCAATGCGACCAGATGCTCCACGCCCAGTCGCGTACCGTCTTCATGGGAGAAAA
TAATACTGTTGATGGGTGTCTGGTCAGAGACATCAAGAAATAACGCCGGAACATTAGTGCAGG
CAGCTTCCACAGCAATGGCATCCTGGTCATCCAGCGGATAGTTAATGATCAGCCCACTGACGC
GTTGCGCGAGAAGATTGTGCACCGCCGCTTTACAGGCTTCGACGCCGCTTCGTTCTACCATCGA
CACCACCACGCTGGCACCCAGTTGATCGGCGCGAGATTTAATCGCCGCGACAATTTGCGACGG
CGCGTGCAGGGCCAGACTGGAGGTGGCAACGCCAATCAGCAACGACTGTTTGCCCGCCAGTTG
TTGTGCCACGCGGTTGGGAATGTAATTCAGCTCCGCCATCGCCGCTTCCACTTTTTCCCGCGTTT
TCGCAGAAACGTGGCTGGCCTGGTTCACCACGCGGGAAACGGTCTGATAAGAGACACCGGCAT
ACTCTGCGACATCGTATAACGTTACTGGTTTCACATTCACCACCCTGAATTGACTCTCTTCCGG
GCGCTATCATGCCATACCGCGAAAGGTTTTGCGCCATTCGATGGTGTCCGGGATCTCGACGCTC
TCCCTTATGCGACTCCTGCATTAGGAAGCAGCCCAGTAGTAGGTTGAGGCCGTTGAGCACCGC
CGCCGCAAGGAATGGTGCATGCAAGGAGATGGCGCCCAACAGTCCCCCGGCCACGGGGCCTG
CCACCATACCCACGCCGAAACAAGCGCTCATGAGCCCGAAGTGGCGAGCCCGATCTTCCCCAT
CGGTGATGTCGGCGATATAGGCGCCAGCAACCGCACCTGTGGCGCCGGTGATGCCGGCCACGA
TGCGTCCGGCGTAGAGGATCGAGATCTCGATCCCGCGAAATTAATACGACTCACTATAGGGGA
ATTGTGAGCGGATAACAATTCCCCTCTAGAAATAATTTTGTTTAACTTTAAGAAGGAGATATAC
CATGGGCAGCAGCCATCATCATCATCATCACAGCAGCGGCCTGGTGCCGCGCGGCAGCCATAT
GGCTAGTATGGATCTGGATGCAGTAAGGATTAAAGTGGACACAGTAAATGCAAAACCGGGAG
ACACAGTAAATATACCTGTAAGATTCAGTGGTATACCATCCAAGGGAATAGCAAACTGTGACT
TTGTATACAGCTATGACCCGAATGTACTTGAGATAATAGAGATAAAACCGGGAGAATTGATAG
TTGACCCGAATCCTACCAAGAGCTTTGATACTGCAGTATATCCTGACAGAAAGATGATAGTAT
TCCTGTTTGCGGAAGACAGCGGAACAGGAGCGTATGCAATAACTAAAGACGGAGTATTTGCTA
CGATAGTAGCGAAAGTAAAAGAAGGAGCACCTAACGGGCTCAGTGTAATCAAATTTGTAGAA
GTAGGCGGATTTGCGAACAATGACCTTGTAGAACAGAAGACACAGTTCTTTGACGGTGGAGTA
AATGTTGGAGATACAACAGAACCTGCAACACCTACAACACCTGTAACAACACCGACAACAAC
AGATGATCTAGATGCAGCTAGCATGAAGGTAAAGAACACAATTGCGGCAACCAGTTTCGCGGC
GGCCGGCCTGGCGGCTCTGGCGGTGGCTGTCTCACCGCCGGCGGCCGCAGGCGATCTGGTGGG
CCCGGGCTGCGCGGAATACGCGGCAGCCAATCCCACTGGGCCGGCCTCGGTGCAGGGAATGTC
GCAGGACCCGGTCGCGGTGGCGGCCTCGAACAATCCGGAGTTGACAACGCTGACGGCTGCACT
GTCGGGCCAGCTCAATCCGCAAGTAAACCTGGTGGACACCCTCAACAGCGGTCAGTACACGGT
GTTCGCACCGACCAACGCGGCATTTAGCAAGCTGCCGGCATCCACGATCGACGAGCTCAAGAC
CAATTCGTCACTGCTGACCAGCATCCTGACCTACCACGTAGTGGCCGGCCAAACCAGCCCGGC
CAACGTCGTCGGCACCCGTCAGACCCTCCAGGGCGCCAGCGTGACGGTGACCGGTCAGGGTAA
CAGCCTCAAGGTCGGTAACGCCGACGTCGTCTGTGGTGGGGTGTCTACCGCCAACGCGACGGT
GTACATGATTGACAGCGTGCTAATGCCTCCGGCGTAAAAGCTTGCGGCCGCACTCGAGCACCA
CCACCACCACCACTGAGATCCGGCTGCTAACAAAGCCCGAAAGGAAGCTGAGTTGGCTGCTGC
CACCGCTGAGCAATAACTAGCATAACCCCTTGGGGCCTCTAAACGGGTCTTGAGGGGTTTTTTG
CTGAAAGGAGGAACTATATCCGGAT
Protein sequence - Ecoli-pET28[6xHis-Cohesin (underlined) -m.tbRv2875 (M. tb.
antigen - bold)]..
(SEQ ID NO: 175)
MGSSHHHHHHSSGLVPRGSHMASMDLDAVRIKVDTVNAKPGDTVNIPVRFSGIPSKGIANC
DFVYSYDPNVLEIIEIKPGELIVDPNPTKSFDTAVYPDRKMIVFLFAEDSGTGAYAITKDGVFATIVA
KVKEGAPNGLSVIKFVEVGGFANNDLVEQKTQFFDGGVNVGDTTEPATPTTPVTTPTTTDDLDAAS
MKVKNTIAATSFAAAGLAALAVAVSPPAAAGDLVGPGCAEYAAANPTGPASVQGMSQDPVA
VAASNNPELTTLTAALSGQLNPQVNLVDTLNSGQYTVFAPTNAAFSKLPASTIDELKTNSSLLT
SILTYHVVAGQTSPANVVGTRQTLQGASVTVTGQGNSLKVGNADVVCGGVSTANATVYMIDS
VLMPPA
Rv0125: C1334: Ecoli-pET28[6xHis-Cohesin (underlined) -m.tbRv0125 (M. tb.
antigen - bold)].
(SEQ ID NO: 176)
TGGCGAATGGGACGCGCCCTGTAGCGGCGCATTAAGCGCGGCGGGTGTGGTGGTTACG
CGCAGCGTGACCGCTACACTTGCCAGCGCCCTAGCGCCCGCTCCTTTCGCTTTCTTCCCTTCCTT
TCTCGCCACGTTCGCCGGCTTTCCCCGTCAAGCTCTAAATCGGGGGCTCCCTTTAGGGTTCCGA
TTTAGTGCTTTACGGCACCTCGACCCCAAAAAACTTGATTAGGGTGATGGTTCACGTAGTGGGC
CATCGCCCTGATAGACGGTTTTTCGCCCTTTGACGTTGGAGTCCACGTTCTTTAATAGTGGACT
CTTGTTCCAAACTGGAACAACACTCAACCCTATCTCGGTCTATTCTTTTGATTTATAAGGGATTT
TGCCGATTTCGGCCTATTGGTTAAAAAATGAGCTGATTTAACAAAAATTTAACGCGAATTTTAA
CAAAATATTAACGTTTACAATTTCAGGTGGCACTTTTCGGGGAAATGTGCGCGGAACCCCTATT
TGTTTATTTTTCTAAATACATTCAAATATGTATCCGCTCATGAATTAATTCTTAGAAAAACTCAT
CGAGCATCAAATGAAACTGCAATTTATTCATATCAGGATTATCAATACCATATTTTTGAAAAAG
CCGTTTCTGTAATGAAGGAGAAAACTCACCGAGGCAGTTCCATAGGATGGCAAGATCCTGGTA
TCGGTCTGCGATTCCGACTCGTCCAACATCAATACAACCTATTAATTTCCCCTCGTCAAAAATA
AGGTTATCAAGTGAGAAATCACCATGAGTGACGACTGAATCCGGTGAGAATGGCAAAAGTTTA
TGCATTTCTTTCCAGACTTGTTCAACAGGCCAGCCATTACGCTCGTCATCAAAATCACTCGCAT
CAACCAAACCGTTATTCATTCGTGATTGCGCCTGAGCGAGACGAAATACGCGATCGCTGTTAA
AAGGACAATTACAAACAGGAATCGAATGCAACCGGCGCAGGAACACTGCCAGCGCATCAACA
ATATTTTCACCTGAATCAGGATATTCTTCTAATACCTGGAATGCTGTTTTCCCGGGGATCGCAG
TGGTGAGTAACCATGCATCATCAGGAGTACGGATAAAATGCTTGATGGTCGGAAGAGGCATAA
ATTCCGTCAGCCAGTTTAGTCTGACCATCTCATCTGTAACATCATTGGCAACGCTACCTTTGCC
ATGTTTCAGAAACAACTCTGGCGCATCGGGCTTCCCATACAATCGATAGATTGTCGCACCTGAT
TGCCCGACATTATCGCGAGCCCATTTATACCCATATAAATCAGCATCCATGTTGGAATTTAATC
GCGGCCTAGAGCAAGACGTTTCCCGTTGAATATGGCTCATAACACCCCTTGTATTACTGTTTAT
GTAAGCAGACAGTTTTATTGTTCATGACCAAAATCCCTTAACGTGAGTTTTCGTTCCACTGAGC
GTCAGACCCCGTAGAAAAGATCAAAGGATCTTCTTGAGATCCTTTTTTTCTGCGCGTAATCTGC
TGCTTGCAAACAAAAAAACCACCGCTACCAGCGGTGGTTTGTTTGCCGGATCAAGAGCTACCA
ACTCTTTTTCCGAAGGTAACTGGCTTCAGCAGAGCGCAGATACCAAATACTGTCCTTCTAGTGT
AGCCGTAGTTAGGCCACCACTTCAAGAACTCTGTAGCACCGCCTACATACCTCGCTCTGCTAAT
CCTGTTACCAGTGGCTGCTGCCAGTGGCGATAAGTCGTGTCTTACCGGGTTGGACTCAAGACG
ATAGTTACCGGATAAGGCGCAGCGGTCGGGCTGAACGGGGGGTTCGTGCACACAGCCCAGCTT
GGAGCGAACGACCTACACCGAACTGAGATACCTACAGCGTGAGCTATGAGAAAGCGCCACGC
TTCCCGAAGGGAGAAAGGCGGACAGGTATCCGGTAAGCGGCAGGGTCGGAACAGGAGAGCGC
ACGAGGGAGCTTCCAGGGGGAAACGCCTGGTATCTTTATAGTCCTGTCGGGTTTCGCCACCTCT
GACTTGAGCGTCGATTTTTGTGATGCTCGTCAGGGGGGCGGAGCCTATGGAAAAACGCCAGCA
ACGCGGCCTTTTTACGGTTCCTGGCCTTTTGCTGGCCTTTTGCTCACATGTTCTTTCCTGCGTTA
TCCCCTGATTCTGTGGATAACCGTATTACCGCCTTTGAGTGAGCTGATACCGCTCGCCGCAGCC
GAACGACCGAGCGCAGCGAGTCAGTGAGCGAGGAAGCGGAAGAGCGCCTGATGCGGTATTTT
CTCCTTACGCATCTGTGCGGTATTTCACACCGCATATATGGTGCACTCTCAGTACAATCTGCTC
TGATGCCGCATAGTTAAGCCAGTATACACTCCGCTATCGCTACGTGACTGGGTCATGGCTGCGC
CCCGACACCCGCCAACACCCGCTGACGCGCCCTGACGGGCTTGTCTGCTCCCGGCATCCGCTTA
CAGACAAGCTGTGACCGTCTCCGGGAGCTGCATGTGTCAGAGGTTTTCACCGTCATCACCGAA
ACGCGCGAGGCAGCTGCGGTAAAGCTCATCAGCGTGGTCGTGAAGCGATTCACAGATGTCTGC
CTGTTCATCCGCGTCCAGCTCGTTGAGTTTCTCCAGAAGCGTTAATGTCTGGCTTCTGATAAAG
CGGGCCATGTTAAGGGCGGTTTTTTCCTGTTTGGTCACTGATGCCTCCGTGTAAGGGGGATTTC
TGTTCATGGGGGTAATGATACCGATGAAACGAGAGAGGATGCTCACGATACGGGTTACTGATG
ATGAACATGCCCGGTTACTGGAACGTTGTGAGGGTAAACAACTGGCGGTATGGATGCGGCGGG
ACCAGAGAAAAATCACTCAGGGTCAATGCCAGCGCTTCGTTAATACAGATGTAGGTGTTCCAC
AGGGTAGCCAGCAGCATCCTGCGATGCAGATCCGGAACATAATGGTGCAGGGCGCTGACTTCC
GCGTTTCCAGACTTTACGAAACACGGAAACCGAAGACCATTCATGTTGTTGCTCAGGTCGCAG
ACGTTTTGCAGCAGCAGTCGCTTCACGTTCGCTCGCGTATCGGTGATTCATTCTGCTAACCAGT
AAGGCAACCCCGCCAGCCTAGCCGGGTCCTCAACGACAGGAGCACGATCATGCGCACCCGTG
GGGCCGCCATGCCGGCGATAATGGCCTGCTTCTCGCCGAAACGTTTGGTGGCGGGACCAGTGA
CGAAGGCTTGAGCGAGGGCGTGCAAGATTCCGAATACCGCAAGCGACAGGCCGATCATCGTC
GCGCTCCAGCGAAAGCGGTCCTCGCCGAAAATGACCCAGAGCGCTGCCGGCACCTGTCCTACG
AGTTGCATGATAAAGAAGACAGTCATAAGTGCGGCGACGATAGTCATGCCCCGCGCCCACCGG
AAGGAGCTGACTGGGTTGAAGGCTCTCAAGGGCATCGGTCGAGATCCCGGTGCCTAATGAGTG
AGCTAACTTACATTAATTGCGTTGCGCTCACTGCCCGCTTTCCAGTCGGGAAACCTGTCGTGCC
AGCTGCATTAATGAATCGGCCAACGCGCGGGGAGAGGCGGTTTGCGTATTGGGCGCCAGGGTG
GTTTTTCTTTTCACCAGTGAGACGGGCAACAGCTGATTGCCCTTCACCGCCTGGCCCTGAGAGA
GTTGCAGCAAGCGGTCCACGCTGGTTTGCCCCAGCAGGCGAAAATCCTGTTTGATGGTGGTTA
ACGGCGGGATATAACATGAGCTGTCTTCGGTATCGTCGTATCCCACTACCGAGATATCCGCAC
CAACGCGCAGCCCGGACTCGGTAATGGCGCGCATTGCGCCCAGCGCCATCTGATCGTTGGCAA
CCAGCATCGCAGTGGGAACGATGCCCTCATTCAGCATTTGCATGGTTTGTTGAAAACCGGACA
TGGCACTCCAGTCGCCTTCCCGTTCCGCTATCGGCTGAATTTGATTGCGAGTGAGATATTTATG
CCAGCCAGCCAGACGCAGACGCGCCGAGACAGAACTTAATGGGCCCGCTAACAGCGCGATTT
GCTGGTGACCCAATGCGACCAGATGCTCCACGCCCAGTCGCGTACCGTCTTCATGGGAGAAAA
TAATACTGTTGATGGGTGTCTGGTCAGAGACATCAAGAAATAACGCCGGAACATTAGTGCAGG
CAGCTTCCACAGCAATGGCATCCTGGTCATCCAGCGGATAGTTAATGATCAGCCCACTGACGC
GTTGCGCGAGAAGATTGTGCACCGCCGCTTTACAGGCTTCGACGCCGCTTCGTTCTACCATCGA
CACCACCACGCTGGCACCCAGTTGATCGGCGCGAGATTTAATCGCCGCGACAATTTGCGACGG
CGCGTGCAGGGCCAGACTGGAGGTGGCAACGCCAATCAGCAACGACTGTTTGCCCGCCAGTTG
TTGTGCCACGCGGTTGGGAATGTAATTCAGCTCCGCCATCGCCGCTTCCACTTTTTCCCGCGTTT
TCGCAGAAACGTGGCTGGCCTGGTTCACCACGCGGGAAACGGTCTGATAAGAGACACCGGCAT
ACTCTGCGACATCGTATAACGTTACTGGTTTCACATTCACCACCCTGAATTGACTCTCTTCCGG
GCGCTATCATGCCATACCGCGAAAGGTTTTGCGCCATTCGATGGTGTCCGGGATCTCGACGCTC
TCCCTTATGCGACTCCTGCATTAGGAAGCAGCCCAGTAGTAGGTTGAGGCCGTTGAGCACCGC
CGCCGCAAGGAATGGTGCATGCAAGGAGATGGCGCCCAACAGTCCCCCGGCCACGGGGCCTG
CCACCATACCCACGCCGAAACAAGCGCTCATGAGCCCGAAGTGGCGAGCCCGATCTTCCCCAT
CGGTGATGTCGGCGATATAGGCGCCAGCAACCGCACCTGTGGCGCCGGTGATGCCGGCCACGA
TGCGTCCGGCGTAGAGGATCGAGATCTCGATCCCGCGAAATTAATACGACTCACTATAGGGGA
ATTGTGAGCGGATAACAATTCCCCTCTAGAAATAATTTTGTTTAACTTTAAGAAGGAGATATAC
CATGGGCAGCAGCCATCATCATCATCATCACAGCAGCGGCCTGGTGCCGCGCGGCAGCCATAT
GGCTAGTATGGATCTGGATGCAGTAAGGATTAAAGTGGACACAGTAAATGCAAAACCGGGAG
ACACAGTAAATATACCTGTAAGATTCAGTGGTATACCATCCAAGGGAATAGCAAACTGTGACT
TTGTATACAGCTATGACCCGAATGTACTTGAGATAATAGAGATAAAACCGGGAGAATTGATAG
TTGACCCGAATCCTACCAAGAGCTTTGATACTGCAGTATATCCTGACAGAAAGATGATAGTAT
TCCTGTTTGCGGAAGACAGCGGAACAGGAGCGTATGCAATAACTAAAGACGGAGTATTTGCTA
CGATAGTAGCGAAAGTAAAAGAAGGAGCACCTAACGGGCTCAGTGTAATCAAATTTGTAGAA
GTAGGCGGATTTGCGAACAATGACCTTGTAGAACAGAAGACACAGTTCTTTGACGGTGGAGTA
AATGTTGGAGATACAACAGAACCTGCAACACCTACAACACCTGTAACAACACCGACAACAAC
AGATGATCTAGATGCAGCTAGCATGAGCAATTCGCGCCGCCGCTCACTCAGGTGGTCATGGTT
GCTGAGCGTGCTGGCTGCCGTCGGGCTGGGCCTGGCCACGGCGCCGGCCCAGGCGGCCCCGCC
GGCCTTGTCGCAGGACCGGTTCGCCGACTTCCCCGCGCTGCCCCTCGACCCGTCCGCGATGGTC
GCCCAAGTGGGGCCACAGGTGGTCAACATCAACACCAAACTGGGCTACAACAACGCCGTGGG
CGCCGGGACCGGCATCGTCATCGATCCCAACGGTGTCGTGCTGACCAACAACCACGTGATCGC
GGGCGCCACCGACATCAATGCGTTCAGCGTCGGCTCCGGCCAAACCTACGGCGTCGATGTGGT
CGGGTATGACCGCACCCAGGATGTCGCGGTGCTGCAGCTGCGCGGTGCCGGTGGCCTGCCGTC
GGCGGCGATCGGTGGCGGCGTCGCGGTTGGTGAGCCCGTCGTCGCGATGGGCAACAGCGGTG
GGCAGGGCGGAACGCCCCGTGCGGTGCCTGGCAGGGTGGTCGCGCTCGGCCAAACCGTGCAG
GCGTCGGATTCGCTGACCGGTGCCGAAGAGACATTGAACGGGTTGATCCAGTTCGATGCCGCG
ATCCAGCCCGGTGATTCGGGCGGGCCCGTCGTCAACGGCCTAGGACAGGTGGTCGGTATGAAC
ACGGCCGCGTCCGATAACTTCCAGCTGTCCCAGGGTGGGCAGGGATTCGCCATTCCGATCGGG
CAGGCGATGGCGATCGCGGGCCAGATCCGATCGGGTGGGGGGTCACCCACCGTTCATATCGGG
CCTACCGCCTTCCTCGGCTTGGGTGTTGTCGACAACAACGGCAACGGCGCACGAGTCCAACGC
GTGGTCGGGAGCGCTCCGGCGGCAAGTCTCGGCATCTCCACCGGCGACGTGATCACCGCGGTC
GACGGCGCTCCGATCAACTCGGCCACCGCGATGGCGGACGCGCTTAACGGGCATCATCCCGGT
GACGTCATCTCGGTGACCTGGCAAACCAAGTCGGGCGGCACGCGTACAGGGAACGTGACATTG
GCCGAGGGACCCCCGGCCTGAGCGGCCGCACTCGAGCACCACCACCACCACCACTGAGATCCG
GCTGCTAACAAAGCCCGAAAGGAAGCTGAGTTGGCTGCTGCCACCGCTGAGCAATAACTAGCA
TAACCCCTTGGGGCCTCTAAACGGGTCTTGAGGGGTTTTTTGCTGAAAGGAGGAACTATATCC
GGAT
Protein sequence - Ecoli-pET28[6xHis-Cohesin (underlined) -m.tbRv0125 (M. tb.
antigen - bold)].
(SEQ ID NO: 177)
MGSSHHHHHHSSGLVPRGSHMASMDLDAVRIKVDTVNAKPGDTVNIPVRFSGIPSKGIANC
DFVYSYDPNVLEIIEIKPGELIVDPNPTKSFDTAVYPDRKMIVFLFAEDSGTGAYAITKDGVFATIVA
KVKEGAPNGLSVIKFVEVGGFANNDLVEQKTQFFDGGVNVGDTTEPATPTTPVTTPTTTDDLDAAS
MSNSRRRSLRWSWLLSVLAAVGLGLATAPAQAAPPALSQDRFADFPALPLDPSAMVAQVGPQ
VVNINTKLGYNNAVGAGTGIVIDPNGVVLTNNHVIAGATDINAFSVGSGQTYGVDVVGYDRT
QDVAVLQLRGAGGLPSAAIGGGVAVGEPVVAMGNSGGQGGTPRAVPGRVVALGQTVQASD
SLTGAEETLNGLIQFDAAIQPGDSGGPVVNGLGQVVGMNTAASDNFQLSQGGQGFAIPIGQA
MAIAGQIRSGGGSPTVHIGPTAFLGLGVVDNNGNGARVQRVVGSAPAASLGISTGDVITAVDG
APINSATAMADALNGHHPGDVISVTWQTKSGGTRTGNVTLAEGPPA
Rv0570: C1500: Ecoli-pET28[6xHis-Cohesin (underlined)-m.tbRv0570 (M. tb. antigen-
bold)].
(SEQ ID NO: 178)
TGGCGAATGGGACGCGCCCTGTAGCGGCGCATTAAGCGCGGCGGGTGTGGTGGTTACG
CGCAGCGTGACCGCTACACTTGCCAGCGCCCTAGCGCCCGCTCCTTTCGCTTTCTTCCCTTCCTT
TCTCGCCACGTTCGCCGGCTTTCCCCGTCAAGCTCTAAATCGGGGGCTCCCTTTAGGGTTCCGA
TTTAGTGCTTTACGGCACCTCGACCCCAAAAAACTTGATTAGGGTGATGGTTCACGTAGTGGGC
CATCGCCCTGATAGACGGTTTTTCGCCCTTTGACGTTGGAGTCCACGTTCTTTAATAGTGGACT
CTTGTTCCAAACTGGAACAACACTCAACCCTATCTCGGTCTATTCTTTTGATTTATAAGGGATTT
TGCCGATTTCGGCCTATTGGTTAAAAAATGAGCTGATTTAACAAAAATTTAACGCGAATTTTAA
CAAAATATTAACGTTTACAATTTCAGGTGGCACTTTTCGGGGAAATGTGCGCGGAACCCCTATT
TGTTTATTTTTCTAAATACATTCAAATATGTATCCGCTCATGAATTAATTCTTAGAAAAACTCAT
CGAGCATCAAATGAAACTGCAATTTATTCATATCAGGATTATCAATACCATATTTTTGAAAAAG
CCGTTTCTGTAATGAAGGAGAAAACTCACCGAGGCAGTTCCATAGGATGGCAAGATCCTGGTA
TCGGTCTGCGATTCCGACTCGTCCAACATCAATACAACCTATTAATTTCCCCTCGTCAAAAATA
AGGTTATCAAGTGAGAAATCACCATGAGTGACGACTGAATCCGGTGAGAATGGCAAAAGTTTA
TGCATTTCTTTCCAGACTTGTTCAACAGGCCAGCCATTACGCTCGTCATCAAAATCACTCGCAT
CAACCAAACCGTTATTCATTCGTGATTGCGCCTGAGCGAGACGAAATACGCGATCGCTGTTAA
AAGGACAATTACAAACAGGAATCGAATGCAACCGGCGCAGGAACACTGCCAGCGCATCAACA
ATATTTTCACCTGAATCAGGATATTCTTCTAATACCTGGAATGCTGTTTTCCCGGGGATCGCAG
TGGTGAGTAACCATGCATCATCAGGAGTACGGATAAAATGCTTGATGGTCGGAAGAGGCATAA
ATTCCGTCAGCCAGTTTAGTCTGACCATCTCATCTGTAACATCATTGGCAACGCTACCTTTGCC
ATGTTTCAGAAACAACTCTGGCGCATCGGGCTTCCCATACAATCGATAGATTGTCGCACCTGAT
TGCCCGACATTATCGCGAGCCCATTTATACCCATATAAATCAGCATCCATGTTGGAATTTAATC
GCGGCCTAGAGCAAGACGTTTCCCGTTGAATATGGCTCATAACACCCCTTGTATTACTGTTTAT
GTAAGCAGACAGTTTTATTGTTCATGACCAAAATCCCTTAACGTGAGTTTTCGTTCCACTGAGC
GTCAGACCCCGTAGAAAAGATCAAAGGATCTTCTTGAGATCCTTTTTTTCTGCGCGTAATCTGC
TGCTTGCAAACAAAAAAACCACCGCTACCAGCGGTGGTTTGTTTGCCGGATCAAGAGCTACCA
ACTCTTTTTCCGAAGGTAACTGGCTTCAGCAGAGCGCAGATACCAAATACTGTCCTTCTAGTGT
AGCCGTAGTTAGGCCACCACTTCAAGAACTCTGTAGCACCGCCTACATACCTCGCTCTGCTAAT
CCTGTTACCAGTGGCTGCTGCCAGTGGCGATAAGTCGTGTCTTACCGGGTTGGACTCAAGACG
ATAGTTACCGGATAAGGCGCAGCGGTCGGGCTGAACGGGGGGTTCGTGCACACAGCCCAGCTT
GGAGCGAACGACCTACACCGAACTGAGATACCTACAGCGTGAGCTATGAGAAAGCGCCACGC
TTCCCGAAGGGAGAAAGGCGGACAGGTATCCGGTAAGCGGCAGGGTCGGAACAGGAGAGCGC
ACGAGGGAGCTTCCAGGGGGAAACGCCTGGTATCTTTATAGTCCTGTCGGGTTTCGCCACCTCT
GACTTGAGCGTCGATTTTTGTGATGCTCGTCAGGGGGGCGGAGCCTATGGAAAAACGCCAGCA
ACGCGGCCTTTTTACGGTTCCTGGCCTTTTGCTGGCCTTTTGCTCACATGTTCTTTCCTGCGTTA
TCCCCTGATTCTGTGGATAACCGTATTACCGCCTTTGAGTGAGCTGATACCGCTCGCCGCAGCC
GAACGACCGAGCGCAGCGAGTCAGTGAGCGAGGAAGCGGAAGAGCGCCTGATGCGGTATTTT
CTCCTTACGCATCTGTGCGGTATTTCACACCGCATATATGGTGCACTCTCAGTACAATCTGCTC
TGATGCCGCATAGTTAAGCCAGTATACACTCCGCTATCGCTACGTGACTGGGTCATGGCTGCGC
CCCGACACCCGCCAACACCCGCTGACGCGCCCTGACGGGCTTGTCTGCTCCCGGCATCCGCTTA
CAGACAAGCTGTGACCGTCTCCGGGAGCTGCATGTGTCAGAGGTTTTCACCGTCATCACCGAA
ACGCGCGAGGCAGCTGCGGTAAAGCTCATCAGCGTGGTCGTGAAGCGATTCACAGATGTCTGC
CTGTTCATCCGCGTCCAGCTCGTTGAGTTTCTCCAGAAGCGTTAATGTCTGGCTTCTGATAAAG
CGGGCCATGTTAAGGGCGGTTTTTTCCTGTTTGGTCACTGATGCCTCCGTGTAAGGGGGATTTC
TGTTCATGGGGGTAATGATACCGATGAAACGAGAGAGGATGCTCACGATACGGGTTACTGATG
ATGAACATGCCCGGTTACTGGAACGTTGTGAGGGTAAACAACTGGCGGTATGGATGCGGCGGG
ACCAGAGAAAAATCACTCAGGGTCAATGCCAGCGCTTCGTTAATACAGATGTAGGTGTTCCAC
AGGGTAGCCAGCAGCATCCTGCGATGCAGATCCGGAACATAATGGTGCAGGGCGCTGACTTCC
GCGTTTCCAGACTTTACGAAACACGGAAACCGAAGACCATTCATGTTGTTGCTCAGGTCGCAG
ACGTTTTGCAGCAGCAGTCGCTTCACGTTCGCTCGCGTATCGGTGATTCATTCTGCTAACCAGT
AAGGCAACCCCGCCAGCCTAGCCGGGTCCTCAACGACAGGAGCACGATCATGCGCACCCGTG
GGGCCGCCATGCCGGCGATAATGGCCTGCTTCTCGCCGAAACGTTTGGTGGCGGGACCAGTGA
CGAAGGCTTGAGCGAGGGCGTGCAAGATTCCGAATACCGCAAGCGACAGGCCGATCATCGTC
GCGCTCCAGCGAAAGCGGTCCTCGCCGAAAATGACCCAGAGCGCTGCCGGCACCTGTCCTACG
AGTTGCATGATAAAGAAGACAGTCATAAGTGCGGCGACGATAGTCATGCCCCGCGCCCACCGG
AAGGAGCTGACTGGGTTGAAGGCTCTCAAGGGCATCGGTCGAGATCCCGGTGCCTAATGAGTG
AGCTAACTTACATTAATTGCGTTGCGCTCACTGCCCGCTTTCCAGTCGGGAAACCTGTCGTGCC
AGCTGCATTAATGAATCGGCCAACGCGCGGGGAGAGGCGGTTTGCGTATTGGGCGCCAGGGTG
GTTTTTCTTTTCACCAGTGAGACGGGCAACAGCTGATTGCCCTTCACCGCCTGGCCCTGAGAGA
GTTGCAGCAAGCGGTCCACGCTGGTTTGCCCCAGCAGGCGAAAATCCTGTTTGATGGTGGTTA
ACGGCGGGATATAACATGAGCTGTCTTCGGTATCGTCGTATCCCACTACCGAGATATCCGCAC
CAACGCGCAGCCCGGACTCGGTAATGGCGCGCATTGCGCCCAGCGCCATCTGATCGTTGGCAA
CCAGCATCGCAGTGGGAACGATGCCCTCATTCAGCATTTGCATGGTTTGTTGAAAACCGGACA
TGGCACTCCAGTCGCCTTCCCGTTCCGCTATCGGCTGAATTTGATTGCGAGTGAGATATTTATG
CCAGCCAGCCAGACGCAGACGCGCCGAGACAGAACTTAATGGGCCCGCTAACAGCGCGATTT
GCTGGTGACCCAATGCGACCAGATGCTCCACGCCCAGTCGCGTACCGTCTTCATGGGAGAAAA
TAATACTGTTGATGGGTGTCTGGTCAGAGACATCAAGAAATAACGCCGGAACATTAGTGCAGG
CAGCTTCCACAGCAATGGCATCCTGGTCATCCAGCGGATAGTTAATGATCAGCCCACTGACGC
GTTGCGCGAGAAGATTGTGCACCGCCGCTTTACAGGCTTCGACGCCGCTTCGTTCTACCATCGA
CACCACCACGCTGGCACCCAGTTGATCGGCGCGAGATTTAATCGCCGCGACAATTTGCGACGG
CGCGTGCAGGGCCAGACTGGAGGTGGCAACGCCAATCAGCAACGACTGTTTGCCCGCCAGTTG
TTGTGCCACGCGGTTGGGAATGTAATTCAGCTCCGCCATCGCCGCTTCCACTTTTTCCCGCGTTT
TCGCAGAAACGTGGCTGGCCTGGTTCACCACGCGGGAAACGGTCTGATAAGAGAGACCGGCAT
ACTCTGCGACATCGTATAACGTTACTGGTTTCACATTCACCACCCTGAATTGACTCTCTTCCGG
GCGCTATCATGCCATACCGCGAAAGGTTTTGCGCCATTCGATGGTGTCCGGGATCTCGACGCTC
TCCCTTATGCGACTCCTGCATTAGGAAGCAGCCCAGTAGTAGGTTGAGGCCGTTGAGCACCGC
CGCCGCAAGGAATGGTGCATGCAAGGAGATGGCGCCCAACAGTCCCCCGGCCACGGGGCCTG
CCACCATACCCACGCCGAAACAAGCGCTCATGAGCCCGAAGTGGCGAGCCCGATCTTCCCCAT
CGGTGATGTCGGCGATATAGGCGCCAGCAACCGCACCTGTGGCGCCGGTGATGCCGGCCACGA
TGCGTCCGGCGTAGAGGATCGAGATCTCGATCCCGCGAAATTAATACGACTCACTATAGGGGA
ATTGTGAGCGGATAACAATTCCCCTCTAGAAATAATTTTGTTTAACTTTAAGAAGGAGATATAC
CATGGGCAGCAGCCATCATCATCATCATCACAGCAGCGGCCTGGTGCCGCGCGGCAGCCATAT
GGCTAGTATGGATCTGGATGCAGTAAGGATTAAAGTGGACACAGTAAATGCAAAACCGGGAG
ACACAGTAAATATACCTGTAAGATTCAGTGGTATACCATCCAAGGGAATAGCAAACTGTGACT
TTGTATACAGCTATGACCCGAATGTACTTGAGATAATAGAGATAAAACCGGGAGAATTGATAG
TTGACCCGAATCCTACCAAGAGCTTTGATACTGCAGTATATCCTGACAGAAAGATGATAGTAT
TCCTGTTTGCGGAAGACAGCGGAACAGGAGCGTATGCAATAACTAAAGACGGAGTATTTGCTA
CGATAGTAGCGAAAGTAAAAGAAGGAGCACCTAACGGGCTCAGTGTAATCAAATTTGTAGAA
GTAGGCGGATTTGCGAACAATGACCTTGTAGAACAGAAGACACAGTTCTTTGACGGTGGAGTA
AATGTTGGAGATACAACAGAACCTGCAACACCTACAACACCTGTAACAACACCGACAACAAC
AGATGATCTAGATGCAGCTAGCGTGGGTGTCAGCTGGCCGGCGAAAGTCCGGCGCCGGGATG
GAACGCTGGTGCCGTTCGACATCGCGCGGATCGAAGCAGCGGTGACGCGGGCAGCGCGCGAG
GTGGCTTGCGACGACCCCGATATGCCGGGCACCGTAGCGAAAGCCGTCGCCGACGCACTCGGG
CGCGGTATCGCTCCCGTTGAGGACATTCAGGACTGCGTGGAGGCCCGGCTGGGGGAAGCCGGT
CTGGATGACGTGGCCCGTGTTTACATCATCTACCGGCAGCGGCGCGCCGAGCTGCGGACGGCT
AAGGCCTTGCTCGGCGTGCGGGACGAGTTAAAGCTGAGCTTGGCGGCCGTGACGGTACTGCGC
GAGCGCTATCTGCTGCACGACGAGCAGGGCCGGCCGGCCGAGTCGACCGGCGAGCTGATGGA
CCGATCGGCGCGCTGTGTCGCGGCGGCCGAGGACCAGTATGAGCCGGGCTCGTCGAGGCGGTG
GGCCGAGCGGTTCGCCACGCTATTACGCAACCTGGAATTCCTGCCGAATTCGCCCACGTTGAT
GAACTCTGGCACCGACCTGGGACTGCTCGCCGGCTGTTTTGTTCTGCCGATTGAGGATTCGCTG
CAATCGATCTTTGCGACGCTGGGACAGGCCGCCGAGCTGCAGCGGGCTGGAGGCGGCACCGG
ATATGCGTTCAGCCACCTGCGACCCGCCGGGGATCGGGTGGCCTCCACGGGCGGCACGGCCAG
CGGACCGGTGTCGTTTCTACGGCTGTATGACAGTGCCGCGGGTGTGGTCTCCATGGGCGGTCG
CCGGCGTGGCGCCTGTATGGCTGTGCTTGATGTGTCGCACCCGGATATCTGTGATTTCGTCACC
GCCAAGGCCGAATCCCCCAGCGAGCTCCCGCATTTCAACCTATCGGTTGGTGTGACCGACGCG
TTCCTGCGGGCCGTCGAACGCAACGGCCTACACCGGCTGGTCAATCCGCGAACCGGCAAGATC
GTCGCGCGGATGCCCGCCGCCGAGCTGTTCGACGCCATCTGCAAAGCCGCGCACGCCGGTGGC
GATCCCGGGCTGGTGTTTCTCGACACGATCAATAGGGCAAACCCGGTGCCGGGGAGAGGCCGC
ATCGAGGCGACCAACCCGTGCGGGGAGGTCCCACTGCTGCCTTACGAGTCATGTAATCTCGGC
TCGATCAACCTCGCCCGGATGCTCGCCGACGGTCGCGTCGACTGGGACCGGCTCGAGGAGGTC
GCCGGTGTGGCGGTGCGGTTCCTTGATGACGTCATCGATGTCAGCCGCTACCCCTTCCCCGAAC
TGGGTGAGGCGGCCCGCGCCACCCGCAAGATCGGGCTGGGAGTCATGGGTTTGGCGGAACTGC
TTGCCGCACTGGGTATTCCGTACGACAGTGAAGAAGCCGTGCGGTTAGCCACCCGGCTCATGC
GTCGCATACAGCAGGCGGCGCACACGGCATCGCGGAGGCTGGCCGAAGAGCGGGGCGCATTC
CCGGCGTTCACCGATAGCCGGTTCGCGCGGTCGGGCCCGAGGCGCAACGCACAGGTCACCTCC
GTCGCTCCGACGGGCACCATCTCACTGATCGCCGGAACCACCGCGGGCATCGAGCCGATGTTC
GCTATCGCGTTCACCCGCGCCATCGTCGGCCGGCATCTGCTGGAGGTCAATCCGTGCTTCGACC
GACTGGCCCGCGATCGGGGCTTTTATCGTGACGAGCTGATCGCCGAGATCGCTCAGCGTGGCG
GAGTCCGTGGCTATCCGCGGCTGCCTGCTGAGGTGCGGGCCGCGTTCCCGACCGCGGCGGAGA
TCGCGCCGCAGTGGCATCTGCGCATGCAGGCCGCGGTGCAGCGCCACGTCGAGGCCGCCGTGT
CCAAGACGGTCAACTTGCCCGCCACGGCGACGGTCGATGACGTCCGCGCCATCTATGTGGCCG
CCTGGAAGGCAAAGGTCAAGGGCATCACGGTGTATCGCTACGGCAGCCGGGAAGGACAGGTA
CTGTCCTACGCCGCGCCGAAACCGCTACTGGCGCAGGCTGACACGGAGTTCAGCGGCGGCTGT
GCGGGCCGCTCCTGCGAGTTCTGAGCGGCCGCACTCGAGCACCACCACCACCACCACTGAGAT
CCGGCTGCTAACAAAGCCCGAAAGGAAGCTGAGTTGGCTGCTGCCACCGCTGAGCAATAACTA
GCATAACCCCTTGGGGCCTCTAAACGGGTCTTGAGGGGTTTTTTGCTGAAAGGAGGAACTATA
TCCGGAT
Protein sequence - Ecoli-pET28[6xHis-Cohesin (underlined) -m.tbRv0570 (M. tb.
antigen - bold)].
(SEQ ID NO: 179)
MGSSHHHHHHSSGLVPRGSHMASMDLDAVRIKVDTVNAKPGDTVNIPVRFSGIPSKGIANC
DFVYSYDPNVLEIIEIKPGELIVDPNPTKSFDTAVYPDRKMIVFLFAEDSGTGAYAITKDGVFATIVA
KVKEGAPNGLSVIKFVEVGGFANNDLVEQKTQFFDGGVNVGDTTEPATPTTPVTTPTTTDDLDAAS
VGVSWPAKVRRRDGTLVPFDIARIEAAVTRAAREVACDDPDMPGTVAKAVADALGRGIAPVE
DIQDCVEARLGEAGLDDVARVYIIYRQRRAELRTAKALLGVRDELKLSLAAVTVLRERYLLH
DEQGRPAESTGELMDRSARCVAAAEDQYEPGSSRRWAERFATLLRNLEFLPNSPTLMNSGTD
LGLLAGCFVLPIEDSLQSIFATLGQAAELQRAGGGTGYAFSHLRPAGDRVASTGGTASGPVSF
LRLYDSAAGVVSMGGRRRGACMAVLDVSHPDICDFVTAKAESPSELPHFNLSVGVTDAFLRA
VERNGLHRLVNPRTGKIVARMPAAELFDAICKAAHAGGDPGLVFLDTINRANPVPGRGRIEA
TNPCGEVPLLPYESCNLGSINLARMLADGRVDWDRLEEVAGVAVRFLDDVIDVSRYPFPELG
EAARATRKIGLGVMGLAELLAALGIPYDSEEAVRLATRLMRRIQQAAHTASRRLAEERGAFP
AFTDSRFARSGPRRNAQVTSVAPTGTISLIAGTTAGIEPMFAIAFTRAIVGRHLLEVNPCFDRL
ARDRGFYRDELIAEIAQRGGVRGYPRLPAEVRAAFPTAAEIAPQWHLRMQAAVQRHVEAAV
SKTVNLPATATVDDVRAIYVAAWKAKVKGITVYRYGSREGQVLSYAAPKPLLAQADTEFSGG
CAGRSCEF
Rv1980: C2197: Ecoli-pET28[6xHis-CthermoCohesin (underlined) -m.tbRv1980 (M. tb.
antigen - bold)].
(SEQ ID NO: 180)
TGGCGAATGGGACGCGCCCTGTAGCGGCGCATTAAGCGCGGCGGGTGTGGTGGTTACG
CGCAGCGTGACCGCTACACTTGCCAGCGCCCTAGCGCCCGCTCCTTTCGCTTTCTTCCCTTCCTT
TCTCGCCACGTTCGCCGGCTTTCCCCGTCAAGCTCTAAATCGGGGGCTCCCTTTAGGGTTCCGA
TTTAGTGCTTTACGGCACCTCGACCCCAAAAAACTTGATTAGGGTGATGGTTCACGTAGTGGGC
CATCGCCCTGATAGACGGTTTTTCGCCCTTTGACGTTGGAGTCCACGTTCTTTAATAGTGGACT
CTTGTTCCAAACTGGAACAACACTCAACCCTATCTCGGTCTATTCTTTTGATTTATAAGGGATTT
TGCCGATTTCGGCCTATTGGTTAAAAAATGAGCTGATTTAACAAAAATTTAACGCGAATTTTAA
CAAAATATTAACGTTTACAATTTCAGGTGGCACTTTTCGGGGAAATGTGCGCGGAACCCCTATT
TGTTTATTTTTCTAAATACATTCAAATATGTATCCGCTCATGAATTAATTCTTAGAAAAACTCAT
CGAGCATCAAATGAAACTGCAATTTATTCATATCAGGATTATCAATACCATATTTTTGAAAAAG
CCGTTTCTGTAATGAAGGAGAAAACTCACCGAGGCAGTTCCATAGGATGGCAAGATCCTGGTA
TCGGTCTGCGATTCCGACTCGTCCAACATCAATACAACCTATTAATTTCCCCTCGTCAAAAATA
AGGTTATCAAGTGAGAAATCACCATGAGTGACGACTGAATCCGGTGAGAATGGCAAAAGTTTA
TGCATTTCTTTCCAGACTTGTTCAACAGGCCAGCCATTACGCTCGTCATCAAAATCACTCGCAT
CAACCAAACCGTTATTCATTCGTGATTGCGCCTGAGCGAGACGAAATACGCGATCGCTGTTAA
AAGGACAATTACAAACAGGAATCGAATGCAACCGGCGCAGGAACACTGCCAGCGCATCAACA
ATATTTTCACCTGAATCAGGATATTCTTCTAATACCTGGAATGCTGTTTTCCCGGGGATCGCAG
TGGTGAGTAACCATGCATCATCAGGAGTACGGATAAAATGCTTGATGGTCGGAAGAGGCATAA
ATTCCGTCAGCCAGTTTAGTCTGACCATCTCATCTGTAACATCATTGGCAACGCTACCTTTGCC
ATGTTTCAGAAACAACTCTGGCGCATCGGGCTTCCCATACAATCGATAGATTGTCGCACCTGAT
TGCCCGACATTATCGCGAGCCCATTTATACCCATATAAATCAGCATCCATGTTGGAATTTAATC
GCGGCCTAGAGCAAGACGTTTCCCGTTGAATATGGCTCATAACACCCCTTGTATTACTGTTTAT
GTAAGCAGACAGTTTTATTGTTCATGACCAAAATCCCTTAACGTGAGTTTTCGTTCCACTGAGC
GTCAGACCCCGTAGAAAAGATCAAAGGATCTTCTTGAGATCCTTTTTTTCTGCGCGTAATCTGC
TGCTTGCAAACAAAAAAACCACCGCTACCAGCGGTGGTTTGTTTGCCGGATCAAGAGCTACCA
ACTCTTTTTCCGAAGGTAACTGGCTTCAGCAGAGCGCAGATACCAAATACTGTCCTTCTAGTGT
AGCCGTAGTTAGGCCACCACTTCAAGAACTCTGTAGCACCGCCTACATACCTCGCTCTGCTAAT
CCTGTTACCAGTGGCTGCTGCCAGTGGCGATAAGTCGTGTCTTACCGGGTTGGACTCAAGACG
ATAGTTACCGGATAAGGCGCAGCGGTCGGGCTGAACGGGGGGTTCGTGCACACAGCCCAGCTT
GGAGCGAACGACCTACACCGAACTGAGATACCTACAGCGTGAGCTATGAGAAAGCGCCACGC
TTCCCGAAGGGAGAAAGGCGGACAGGTATCCGGTAAGCGGCAGGGTCGGAACAGGAGAGCGC
ACGAGGGAGCTTCCAGGGGGAAACGCCTGGTATCTTTATAGTCCTGTCGGGTTTCGCCACCTCT
GACTTGAGCGTCGATTTTTGTGATGCTCGTCAGGGGGGCGGAGCCTATGGAAAAACGCCAGCA
ACGCGGCCTTTTTACGGTTCCTGGCCTTTTGCTGGCCTTTTGCTCACATGTTCTTTCCTGCGTTA
TCCCCTGATTCTGTGGATAACCGTATTACCGCCTTTGAGTGAGCTGATACCGCTCGCCGCAGCC
GAACGACCGAGCGCAGCGAGTCAGTGAGCGAGGAAGCGGAAGAGCGCCTGATGCGGTATTTT
CTCCTTACGCATCTGTGCGGTATTTCACACCGCATATATGGTGCACTCTCAGTACAATCTGCTC
TGATGCCGCATAGTTAAGCCAGTATACACTCCGCTATCGCTACGTGACTGGGTCATGGCTGCGC
CCCGACACCCGCCAACACCCGCTGACGCGCCCTGACGGGCTTGTCTGCTCCCGGCATCCGCTTA
CAGACAAGCTGTGACCGTCTCCGGGAGCTGCATGTGTCAGAGGTTTTCACCGTCATCACCGAA
ACGCGCGAGGCAGCTGCGGTAAAGCTCATCAGCGTGGTCGTGAAGCGATTCACAGATGTCTGC
CTGTTCATCCGCGTCCAGCTCGTTGAGTTTCTCCAGAAGCGTTAATGTCTGGCTTCTGATAAAG
CGGGCCATGTTAAGGGCGGTTTTTTCCTGTTTGGTCACTGATGCCTCCGTGTAAGGGGGATTTC
TGTTCATGGGGGTAATGATACCGATGAAACGAGAGAGGATGCTCACGATACGGGTTACTGATG
ATGAACATGCCCGGTTACTGGAACGTTGTGAGGGTAAACAACTGGCGGTATGGATGCGGCGGG
ACCAGAGAAAAATCACTCAGGGTCAATGCCAGCGCTTCGTTAATACAGATGTAGGTGTTCCAC
AGGGTAGCCAGCAGCATCCTGCGATGCAGATCCGGAACATAATGGTGCAGGGCGCTGACTTCC
GCGTTTCCAGACTTTACGAAACACGGAAACCGAAGACCATTCATGTTGTTGCTCAGGTCGCAG
ACGTTTTGCAGCAGCAGTCGCTTCACGTTCGCTCGCGTATCGGTGATTCATTCTGCTAACCAGT
AAGGCAACCCCGCCAGCCTAGCCGGGTCCTCAACGACAGGAGCACGATCATGCGCACCCGTG
GGGCCGCCATGCCGGCGATAATGGCCTGCTTCTCGCCGAAACGTTTGGTGGCGGGACCAGTGA
CGAAGGCTTGAGCGAGGGCGTGCAAGATTCCGAATACCGCAAGCGACAGGCCGATCATCGTC
GCGCTCCAGCGAAAGCGGTCCTCGCCGAAAATGACCCAGAGCGCTGCCGGCACCTGTCCTACG
AGTTGCATGATAAAGAAGACAGTCATAAGTGCGGCGACGATAGTCATGCCCCGCGCCCACCGG
AAGGAGCTGACTGGGTTGAAGGCTCTCAAGGGCATCGGTCGAGATCCCGGTGCCTAATGAGTG
AGCTAACTTACATTAATTGCGTTGCGCTCACTGCCCGCTTTCCAGTCGGGAAACCTGTCGTGCC
AGCTGCATTAATGAATCGGCCAACGCGCGGGGAGAGGCGGTTTGCGTATTGGGCGCCAGGGTG
GTTTTTCTTTTCACCAGTGAGACGGGCAACAGCTGATTGCCCTTCACCGCCTGGCCCTGAGAGA
GTTGCAGCAAGCGGTCCACGCTGGTTTGCCCCAGCAGGCGAAAATCCTGTTTGATGGTGGTTA
ACGGCGGGATATAACATGAGCTGTCTTCGGTATCGTCGTATCCCACTACCGAGATATCCGCAC
CAACGCGCAGCCCGGACTCGGTAATGGCGCGCATTGCGCCCAGCGCCATCTGATCGTTGGCAA
CCAGCATCGCAGTGGGAACGATGCCCTCATTCAGCATTTGCATGGTTTGTTGAAAACCGGACA
TGGCACTCCAGTCGCCTTCCCGTTCCGCTATCGGCTGAATTTGATTGCGAGTGAGATATTTATG
CCAGCCAGCCAGACGCAGACGCGCCGAGACAGAACTTAATGGGCCCGCTAACAGCGCGATTT
GCTGGTGACCCAATGCGACCAGATGCTCCACGCCCAGTCGCGTACCGTCTTCATGGGAGAAAA
TAATACTGTTGATGGGTGTCTGGTCAGAGACATCAAGAAATAACGCCGGAACATTAGTGCAGG
CAGCTTCCACAGCAATGGCATCCTGGTCATCCAGCGGATAGTTAATGATCAGCCCACTGACGC
GTTGCGCGAGAAGATTGTGCACCGCCGCTTTACAGGCTTCGACGCCGCTTCGTTCTACCATCGA
CACCACCACGCTGGCACCCAGTTGATCGGCGCGAGATTTAATCGCCGCGACAATTTGCGACGG
CGCGTGCAGGGCCAGACTGGAGGTGGCAACGCCAATCAGCAACGACTGTTTGCCCGCCAGTTG
TTGTGCCACGCGGTTGGGAATGTAATTCAGCTCCGCCATCGCCGCTTCCACTTTTTCCCGCGTTT
TCGCAGAAACGTGGCTGGCCTGGTTCACCACGCGGGAAACGGTCTGATAAGAGACACCGGCAT
ACTCTGCGACATCGTATAACGTTACTGGTTTCACATTCACCACCCTGAATTGACTCTCTTCCGG
GCGCTATCATGCCATACCGCGAAAGGTTTTGCGCCATTCGATGGTGTCCGGGATCTCGACGCTC
TCCCTTATGCGACTCCTGCATTAGGAAGCAGCCCAGTAGTAGGTTGAGGCCGTTGAGCACCGC
CGCCGCAAGGAATGGTGCATGCAAGGAGATGGCGCCCAACAGTCCCCCGGCCACGGGGCCTG
CCACCATACCCACGCCGAAACAAGCGCTCATGAGCCCGAAGTGGCGAGCCCGATCTTCCCCAT
CGGTGATGTCGGCGATATAGGCGCCAGCAACCGCACCTGTGGCGCCGGTGATGCCGGCCACGA
TGCGTCCGGCGTAGAGGATCGAGATCTCGATCCCGCGAAATTAATACGACTCACTATAGGGGA
ATTGTGAGCGGATAACAATTCCCCTCTAGAAATAATTTTGTTTAACTTTAAGAAGGAGATATAC
CATGGGCAGCAGCCATCATCATCATCATCACAGCAGCGGCCTGGTGCCGCGCGGCAGCCATAT
GGCTAGTATGGATCTGGATGCAGTAAGGATTAAAGTGGACACAGTAAATGCAAAACCGGGAG
ACACAGTAAATATACCTGTAAGATTCAGTGGTATACCATCCAAGGGAATAGCAAACTGTGACT
TTGTATACAGCTATGACCCGAATGTACTTGAGATAATAGAGATAAAACCGGGAGAATTGATAG
TTGACCCGAATCCTACCAAGAGCTTTGATACTGCAGTATATCCTGACAGAAAGATGATAGTAT
TCCTGTTTGCGGAAGACAGCGGAACAGGAGCGTATGCAATAACTAAAGACGGAGTATTTGCTA
CGATAGTAGCGAAAGTAAAAGAAGGAGCACCTAACGGGCTCAGTGTAATCAAATTTGTAGAA
GTAGGCGGATTTGCGAACAATGACCTTGTAGAACAGAAGACACAGTTCTTTGACGGTGGAGTA
AATGTTGGAGATACAACAGAACCTGCAACACCTACAACACCTGTAACAACACCGACAACAAC
AGATGATCTAGATGCAGCTAGCGCCGCGCCCAAGACCTACTGCGAGGAGTTGAAAGGCACCG
ATACCGGCCAGGCGTGCCAGATTCAAATGTCCGACCCGGCCTACAACATCAACATCAGCCTGC
CCAGTTACTACCCCGACCAGAAGTCGCTGGAAAATTACATCGCCCAGACGCGCGACAAGTTCC
TCAGCGCGGCCACATCGTCCACTCCACGCGAAGCCCCCTACGAATTGAATATCACCTCGGCCA
CATACCAGTCCGCGATACCGCCGCGTGGTACGCAGGCCGTGGTGCTCAAGGTCTACCAGAACG
CCGGCGGCACGCACCCAACGACCACGTACAAGGCCTTCGATTGGGACCAGGCCTATCGCAAGC
CAATCACCTATGACACGCTGTGGCAGGCTGACACCGATCCGCTGCCAGTCGTCTTCCCCATTGT
GCAAGGTGAACTGAGCAAGCAGACCGGACAACAGGTATCGATAGCGCCGAATGCCGGCTTGG
ACCCGGTGAATTATCAGAACTTCGCAGTCACGAACGACGGGGTGATTTTCTTCTTCAACCCGG
GGGAGTTGCTGCCCGAAGCAGCCGGCCCAACCCAGGTATTGGTCCCACGTTCCGCGATCGACT
CGATGCTGGCCGAATTCTAGGCGGCCGCACTCGAGCACCACCACCACCACCACTGAGATCCGG
CTGCTAACAAAGCCCGAAAGGAAGCTGAGTTGGCTGCTGCCACCGCTGAGCAATAACTAGCAT
AACCCCTTGGGGCCTCTAAACGGGTCTTGAGGGGTTTTTTGCTGAAAGGAGGAACTATATCCG
GAT
Protein sequence - Ecoli-pET28[6xHis-CthermoCohesin (underlined) -m.tbRv1980 (M.
tb. antigen - bold)].
(SEQ ID NO: 181)
MGSSHHHHHHSSGLVPRGSHMASMDLDAVRIKVDTVNAKPGDTVNIPVRFSGIPSKGIANC
DFVYSYDPNVLEIIEIKPGELIVDPNPTKSFDTAVYPDRKMIVFLFAEDSGTGAYAITKDGVFATIVA
KVKEGAPNGLSVIKFVEVGGFANNDLVEQKTQFFDGGVNVGDTTEPATPTTPVTTPTTTDDLDAAS
AAPKTYCEELKGTDTGQACQIQMSDPAYNINISLPSYYPDQKSLENYIAQTRDKFLSAATSSTP
REAPYELNITSATYQSAIPPRGTQAVVLKVYQNAGGTHPTTTYKAFDWDQAYRKPITYDTLW
QADTDPLPVVFPIVQGELSKQTGQQVSIAPNAGLDPVNYQNFAVTNDGVIFFFNPGELLPEAA
GPTQVLVPRSAIDSMLAEF
Rv0475: C2199: Ecoli-pET28[6xHis-CthermoCohesin (underlined) -m.tbRv0475 (M. tb.
antigen - bold)].
(SEQ ID NO: 182)
TGGCGAATGGGACGCGCCCTGTAGCGGCGCATTAAGCGCGGCGGGTGTGGTGGTTACG
CGCAGCGTGACCGCTACACTTGCCAGCGCCCTAGCGCCCGCTCCTTTCGCTTTCTTCCCTTCCTT
TCTCGCCACGTTCGCCGGCTTTCCCCGTCAAGCTCTAAATCGGGGGCTCCCTTTAGGGTTCCGA
TTTAGTGCTTTACGGCACCTCGACCCCAAAAAACTTGATTAGGGTGATGGTTCACGTAGTGGGC
CATCGCCCTGATAGACGGTTTTTCGCCCTTTGACGTTGGAGTCCACGTTCTTTAATAGTGGACT
CTTGTTCCAAACTGGAACAACACTCAACCCTATCTCGGTCTATTCTTTTGATTTATAAGGGATTT
TGCCGATTTCGGCCTATTGGTTAAAAAATGAGCTGATTTAACAAAAATTTAACGCGAATTTTAA
CAAAATATTAACGTTTACAATTTCAGGTGGCACTTTTCGGGGAAATGTGCGCGGAACCCCTATT
TGTTTATTTTTCTAAATACATTCAAATATGTATCCGCTCATGAATTAATTCTTAGAAAAACTCAT
CGAGCATCAAATGAAACTGCAATTTATTCATATCAGGATTATCAATACCATATTTTTGAAAAAG
CCGTTTCTGTAATGAAGGAGAAAACTCACCGAGGCAGTTCCATAGGATGGCAAGATCCTGGTA
TCGGTCTGCGATTCCGACTCGTCCAACATCAATACAACCTATTAATTTCCCCTCGTCAAAAATA
AGGTTATCAAGTGAGAAATCACCATGAGTGACGACTGAATCCGGTGAGAATGGCAAAAGTTTA
TGCATTTCTTTCCAGACTTGTTCAACAGGCCAGCCATTACGCTCGTCATCAAAATCACTCGCAT
CAACCAAACCGTTATTCATTCGTGATTGCGCCTGAGCGAGACGAAATACGCGATCGCTGTTAA
AAGGACAATTACAAACAGGAATCGAATGCAACCGGCGCAGGAACACTGCCAGCGCATCAACA
ATATTTTCACCTGAATCAGGATATTCTTCTAATACCTGGAATGCTGTTTTCCCGGGGATCGCAG
TGGTGAGTAACCATGCATCATCAGGAGTACGGATAAAATGCTTGATGGTCGGAAGAGGCATAA
ATTCCGTCAGCCAGTTTAGTCTGACCATCTCATCTGTAACATCATTGGCAACGCTACCTTTGCC
ATGTTTCAGAAACAACTCTGGCGCATCGGGCTTCCCATACAATCGATAGATTGTCGCACCTGAT
TGCCCGACATTATCGCGAGCCCATTTATACCCATATAAATCAGCATCCATGTTGGAATTTAATC
GCGGCCTAGAGCAAGACGTTTCCCGTTGAATATGGCTCATAACACCCCTTGTATTACTGTTTAT
GTAAGCAGACAGTTTTATTGTTCATGACCAAAATCCCTTAACGTGAGTTTTCGTTCCACTGAGC
GTCAGACCCCGTAGAAAAGATCAAAGGATCTTCTTGAGATCCTTTTTTTCTGCGCGTAATCTGC
TGCTTGCAAACAAAAAAACCACCGCTACCAGCGGTGGTTTGTTTGCCGGATCAAGAGCTACCA
ACTCTTTTTCCGAAGGTAACTGGCTTCAGCAGAGCGCAGATACCAAATACTGTCCTTCTAGTGT
AGCCGTAGTTAGGCCACCACTTCAAGAACTCTGTAGCACCGCCTACATACCTCGCTCTGCTAAT
CCTGTTACCAGTGGCTGCTGCCAGTGGCGATAAGTCGTGTCTTACCGGGTTGGACTCAAGACG
ATAGTTACCGGATAAGGCGCAGCGGTCGGGCTGAACGGGGGGTTCGTGCACACAGCCCAGCTT
GGAGCGAACGACCTACACCGAACTGAGATACCTACAGCGTGAGCTATGAGAAAGCGCCACGC
TTCCCGAAGGGAGAAAGGCGGACAGGTATCCGGTAAGCGGCAGGGTCGGAACAGGAGAGCGC
ACGAGGGAGCTTCCAGGGGGAAACGCCTGGTATCTTTATAGTCCTGTCGGGTTTCGCCACCTCT
GACTTGAGCGTCGATTTTTGTGATGCTCGTCAGGGGGGCGGAGCCTATGGAAAAACGCCAGCA
ACGCGGCCTTTTTACGGTTCCTGGCCTTTTGCTGGCCTTTTGCTCACATGTTCTTTCCTGCGTTA
TCCCCTGATTCTGTGGATAACCGTATTACCGCCTTTGAGTGAGCTGATACCGCTCGCCGCAGCC
GAACGACCGAGCGCAGCGAGTCAGTGAGCGAGGAAGCGGAAGAGCGCCTGATGCGGTATTTT
CTCCTTACGCATCTGTGCGGTATTTCACACCGCATATATGGTGCACTCTCAGTACAATCTGCTC
TGATGCCGCATAGTTAAGCCAGTATACACTCCGCTATCGCTACGTGACTGGGTCATGGCTGCGC
CCCGACACCCGCCAACACCCGCTGACGCGCCCTGACGGGCTTGTCTGCTCCCGGCATCCGCTTA
CAGACAAGCTGTGACCGTCTCCGGGAGCTGCATGTGTCAGAGGTTTTCACCGTCATCACCGAA
ACGCGCGAGGCAGCTGCGGTAAAGCTCATCAGCGTGGTCGTGAAGCGATTCACAGATGTCTGC
CTGTTCATCCGCGTCCAGCTCGTTGAGTTTCTCCAGAAGCGTTAATGTCTGGCTTCTGATAAAG
CGGGCCATGTTAAGGGCGGTTTTTTCCTGTTTGGTCACTGATGCCTCCGTGTAAGGGGGATTTC
TGTTCATGGGGGTAATGATACCGATGAAACGAGAGAGGATGCTCACGATACGGGTTACTGATG
ATGAACATGCCCGGTTACTGGAACGTTGTGAGGGTAAACAACTGGCGGTATGGATGCGGCGGG
ACCAGAGAAAAATCACTCAGGGTCAATGCCAGCGCTTCGTTAATACAGATGTAGGTGTTCCAC
AGGGTAGCCAGCAGCATCCTGCGATGCAGATCCGGAACATAATGGTGCAGGGCGCTGACTTCC
GCGTTTCCAGACTTTACGAAACACGGAAACCGAAGACCATTCATGTTGTTGCTCAGGTCGCAG
ACGTTTTGCAGCAGCAGTCGCTTCACGTTCGCTCGCGTATCGGTGATTCATTCTGCTAACCAGT
AAGGCAACCCCGCCAGCCTAGCCGGGTCCTCAACGACAGGAGCACGATCATGCGCACCCGTG
GGGCCGCCATGCCGGCGATAATGGCCTGCTTCTCGCCGAAACGTTTGGTGGCGGGACCAGTGA
CGAAGGCTTGAGCGAGGGCGTGCAAGATTCCGAATACCGCAAGCGACAGGCCGATCATCGTC
GCGCTCCAGCGAAAGCGGTCCTCGCCGAAAATGACCCAGAGCGCTGCCGGCACCTGTCCTACG
AGTTGCATGATAAAGAAGACAGTCATAAGTGCGGCGACGATAGTCATGCCCCGCGCCCACCGG
AAGGAGCTGACTGGGTTGAAGGCTCTCAAGGGCATCGGTCGAGATCCCGGTGCCTAATGAGTG
AGCTAACTTACATTAATTGCGTTGCGCTCACTGCCCGCTTTCCAGTCGGGAAACCTGTCGTGCC
AGCTGCATTAATGAATCGGCCAACGCGCGGGGAGAGGCGGTTTGCGTATTGGGCGCCAGGGTG
GTTTTTCTTTTCACCAGTGAGACGGGCAACAGCTGATTGCCCTTCACCGCCTGGCCCTGAGAGA
GTTGCAGCAAGCGGTCCACGCTGGTTTGCCCCAGCAGGCGAAAATCCTGTTTGATGGTGGTTA
ACGGCGGGATATAACATGAGCTGTCTTCGGTATCGTCGTATCCCACTACCGAGATATCCGCAC
CAACGCGCAGCCCGGACTCGGTAATGGCGCGCATTGCGCCCAGCGCCATCTGATCGTTGGCAA
CCAGCATCGCAGTGGGAACGATGCCCTCATTCAGCATTTGCATGGTTTGTTGAAAACCGGACA
TGGCACTCCAGTCGCCTTCCCGTTCCGCTATCGGCTGAATTTGATTGCGAGTGAGATATTTATG
CCAGCCAGCCAGACGCAGACGCGCCGAGACAGAACTTAATGGGCCCGCTAACAGCGCGATTT
GCTGGTGACCCAATGCGACCAGATGCTCCACGCCCAGTCGCGTACCGTCTTCATGGGAGAAAA
TAATACTGTTGATGGGTGTCTGGTCAGAGACATCAAGAAATAACGCCGGAACATTAGTGCAGG
CAGCTTCCACAGCAATGGCATCCTGGTCATCCAGCGGATAGTTAATGATCAGCCCACTGACGC
GTTGCGCGAGAAGATTGTGCACCGCCGCTTTACAGGCTTCGACGCCGCTTCGTTCTACCATCGA
CACCACCACGCTGGCACCCAGTTGATCGGCGCGAGATTTAATCGCCGCGACAATTTGCGACGG
CGCGTGCAGGGCCAGACTGGAGGTGGCAACGCCAATCAGCAACGACTGTTTGCCCGCCAGTTG
TTGTGCCACGCGGTTGGGAATGTAATTCAGCTCCGCCATCGCCGCTTCCACTTTTTCCCGCGTTT
TCGCAGAAACGTGGCTGGCCTGGTTCACCACGCGGGAAACGGTCTGATAAGAGACACCGGCAT
ACTCTGCGACATCGTATAACGTTACTGGTTTCACATTCACCACCCTGAATTGACTCTCTTCCGG
GCGCTATCATGCCATACCGCGAAAGGTTTTGCGCCATTCGATGGTGTCCGGGATCTCGACGCTC
TCCCTTATGCGACTCCTGCATTAGGAAGCAGCCCAGTAGTAGGTTGAGGCCGTTGAGCACCGC
CGCCGCAAGGAATGGTGCATGCAAGGAGATGGCGCCCAACAGTCCCCCGGCCACGGGGCCTG
CCACCATACCCACGCCGAAACAAGCGCTCATGAGCCCGAAGTGGCGAGCCCGATCTTCCCCAT
CGGTGATGTCGGCGATATAGGCGCCAGCAACCGCACCTGTGGCGCCGGTGATGCCGGCCACGA
TGCGTCCGGCGTAGAGGATCGAGATCTCGATCCCGCGAAATTAATACGACTCACTATAGGGGA
ATTGTGAGCGGATAACAATTCCCCTCTAGAAATAATTTTGTTTAACTTTAAGAAGGAGATATAC
CATGGGCAGCAGCCATCATCATCATCATCACAGCAGCGGCCTGGTGCCGCGCGGCAGCCATAT
GGCTAGTATGGATCTGGATGCAGTAAGGATTAAAGTGGACACAGTAAATGCAAAACCGGGAG
ACACAGTAAATATACCTGTAAGATTCAGTGGTATACCATCCAAGGGAATAGCAAACTGTGACT
TTGTATACAGCTATGACCCGAATGTACTTGAGATAATAGAGATAAAACCGGGAGAATTGATAG
TTGACCCGAATCCTACCAAGAGCTTTGATACTGCAGTATATCCTGACAGAAAGATGATAGTAT
TCCTGTTTGCGGAAGACAGCGGAACAGGAGCGTATGCAATAACTAAAGACGGAGTATTTGCTA
CGATAGTAGCGAAAGTAAAAGAAGGAGCACCTAACGGGCTCAGTGTAATCAAATTTGTAGAA
GTAGGCGGATTTGCGAACAATGACCTTGTAGAACAGAAGACACAGTTCTTTGACGGTGGAGTA
AATGTTGGAGATACAACAGAACCTGCAACACCTACAACACCTGTAACAACACCGACAACAAC
AGATGATCTAGATGCAGCTAGCTGCAGCTGTATGGCTGAAAACTCGAACATTGATGACATCAA
GGCTCCGTTGCTTGCCGCGCTTGGAGCGGCCGACCTGGCCTTGGCCACTGTCAACGAGTTGATC
ACGAACCTGCGTGAGCGTGCGGAGGAGACTCGTACGGACACCCGCAGCCGGGTCGAGGAGAG
CCGTGCTCGCCTGACCAAGCTGCAGGAAGATCTGCCCGAGCAGCTCACCGAGCTGCGTGAGAA
GTTCACCGCCGAGGAGCTGCGTAAGGCCGCCGAGGGCTACCTCGAGGCCGCGACTAGCCGGTA
CAACGAGCTGGTCGAGCGCGGTGAGGCCGCTCTAGAGCGGCTGCGCAGCCAGCAGAGCTTCG
AGGAAGTGTCGGCGCGCGCCGAAGGCTACGTGGACCAGGCGGTGGAGTTGACCCAGGAGGCG
TTGGGTACGGTCGCATCGCAGACCCGCGCGGTCGGTGAGCGTGCCGCCAAGCTGGTCGGCATC
GAGCTGCCTAAGAAGGCTGCTCCGGCCAAGAAGGCCGCTCCGGCCAAGAAGGCCGCTCCGGC
CAAGAAGGCGGCGGCCAAGAAGGCGCCCGCGAAGAAGGCGGCGGCCAAGAAGGTCACCCAG
AAGTGCAGCTGTTAGGCGGCCGCACTCGAGCACCACCACCACCACCACTGAGATCCGGCTGCT
AACAAAGCCCGAAAGGAAGCTGAGTTGGCTGCTGCCACCGCTGAGCAATAACTAGCATAACC
CCTTGGGGCCTCTAAACGGGTCTTGAGGGGTTTTTTGCTGAAAGGAGGAACTATATCCGGAT
Protein sequence - Ecoli-pET28[6xHis-CthermoCohesin (underlined) -m.tbRv0475 (M.
tb. antigen - bold)].
(SEQ ID NO: 183)
MGSSHHHHHHSSGLVPRGSHMASMDLDAVRIKVDTVNAKPGDTVNIPVRFSGIPSKGIANC
DFVYSYDPNVLEIIEIKPGELIVDPNPTKSFDTAVYPDRKMIVFLFAEDSGTGAYAITKDGVFATIVA
KVKEGAPNGLSVIKFVEVGGFANNDLVEQKTQFFDGGVNVGDTTEPATPTTPVTTPTTTDDLDAAS
CSCMAENSNIDDIKAPLLAALGAADLALATVNELITNLRERAEETRTDTRSRVEESRARLTKL
QEDLPEQLTELREKFTAEELRKAAEGYLEAATSRYNELVERGEAALERLRSQQSFEEVSARA
EGYVDQAVELTQEALGTVASQTRAVGERAAKLVGIELPKKAAPAKKAAPAKKAAPAKKAAA
KKAPAKKAAAKKVTQKCSC
Rv0288: C2202: Ecoli-pET28[6xHis-CthermoCohesin (underlined) -m.tbRv0288 (M. tb.
antigen - bold)].
(SEQ ID NO: 184)
TGGCGAATGGGACGCGCCCTGTAGCGGCGCATTAAGCGCGGCGGGTGTGGTGGTTACG
CGCAGCGTGACCGCTACACTTGCCAGCGCCCTAGCGCCCGCTCCTTTCGCTTTCTTCCCTTCCTT
TCTCGCCACGTTCGCCGGCTTTCCCCGTCAAGCTCTAAATCGGGGGCTCCCTTTAGGGTTCCGA
TTTAGTGCTTTACGGCACCTCGACCCCAAAAAACTTGATTAGGGTGATGGTTCACGTAGTGGGC
CATCGCCCTGATAGACGGTTTTTCGCCCTTTGACGTTGGAGTCCACGTTCTTTAATAGTGGACT
CTTGTTCCAAACTGGAACAACACTCAACCCTATCTCGGTCTATTCTTTTGATTTATAAGGGATTT
TGCCGATTTCGGCCTATTGGTTAAAAAATGAGCTGATTTAACAAAAATTTAACGCGAATTTTAA
CAAAATATTAACGTTTACAATTTCAGGTGGCACTTTTCGGGGAAATGTGCGCGGAACCCCTATT
TGTTTATTTTTCTAAATACATTCAAATATGTATCCGCTCATGAATTAATTCTTAGAAAAACTCAT
CGAGCATCAAATGAAACTGCAATTTATTCATATCAGGATTATCAATACCATATTTTTGAAAAAG
CCGTTTCTGTAATGAAGGAGAAAACTCACCGAGGCAGTTCCATAGGATGGCAAGATCCTGGTA
TCGGTCTGCGATTCCGACTCGTCCAACATCAATACAACCTATTAATTTCCCCTCGTCAAAAATA
AGGTTATCAAGTGAGAAATCACCATGAGTGACGACTGAATCCGGTGAGAATGGCAAAAGTTTA
TGCATTTCTTTCCAGACTTGTTCAACAGGCCAGCCATTACGCTCGTCATCAAAATCACTCGCAT
CAACCAAACCGTTATTCATTCGTGATTGCGCCTGAGCGAGACGAAATACGCGATCGCTGTTAA
AAGGACAATTACAAACAGGAATCGAATGCAACCGGCGCAGGAACACTGCCAGCGCATCAACA
ATATTTTCACCTGAATCAGGATATTCTTCTAATACCTGGAATGCTGTTTTCCCGGGGATCGCAG
TGGTGAGTAACCATGCATCATCAGGAGTACGGATAAAATGCTTGATGGTCGGAAGAGGCATAA
ATTCCGTCAGCCAGTTTAGTCTGACCATCTCATCTGTAACATCATTGGCAACGCTACCTTTGCC
ATGTTTCAGAAACAACTCTGGCGCATCGGGCTTCCCATACAATCGATAGATTGTCGCACCTGAT
TGCCCGACATTATCGCGAGCCCATTTATACCCATATAAATCAGCATCCATGTTGGAATTTAATC
GCGGCCTAGAGCAAGACGTTTCCCGTTGAATATGGCTCATAACACCCCTTGTATTACTGTTTAT
GTAAGCAGACAGTTTTATTGTTCATGACCAAAATCCCTTAACGTGAGTTTTCGTTCCACTGAGC
GTCAGACCCCGTAGAAAAGATCAAAGGATCTTCTTGAGATCCTTTTTTTCTGCGCGTAATCTGC
TGCTTGCAAACAAAAAAACCACCGCTACCAGCGGTGGTTTGTTTGCCGGATCAAGAGCTACCA
ACTCTTTTTCCGAAGGTAACTGGCTTCAGCAGAGCGCAGATACCAAATACTGTCCTTCTAGTGT
AGCCGTAGTTAGGCCACCACTTCAAGAACTCTGTAGCACCGCCTACATACCTCGCTCTGCTAAT
CCTGTTACCAGTGGCTGCTGCCAGTGGCGATAAGTCGTGTCTTACCGGGTTGGACTCAAGACG
ATAGTTACCGGATAAGGCGCAGCGGTCGGGCTGAACGGGGGGTTCGTGCACACAGCCCAGCTT
GGAGCGAACGACCTACACCGAACTGAGATACCTACAGCGTGAGCTATGAGAAAGCGCCACGC
TTCCCGAAGGGAGAAAGGCGGACAGGTATCCGGTAAGCGGCAGGGTCGGAACAGGAGAGCGC
ACGAGGGAGCTTCCAGGGGGAAACGCCTGGTATCTTTATAGTCCTGTCGGGTTTCGCCACCTCT
GACTTGAGCGTCGATTTTTGTGATGCTCGTCAGGGGGGCGGAGCCTATGGAAAAACGCCAGCA
ACGCGGCCTTTTTACGGTTCCTGGCCTTTTGCTGGCCTTTTGCTCACATGTTCTTTCCTGCGTTA
TCCCCTGATTCTGTGGATAACCGTATTACCGCCTTTGAGTGAGCTGATACCGCTCGCCGCAGCC
GAACGACCGAGCGCAGCGAGTCAGTGAGCGAGGAAGCGGAAGAGCGCCTGATGCGGTATTTT
CTCCTTACGCATCTGTGCGGTATTTCACACCGCATATATGGTGCACTCTCAGTACAATCTGCTC
TGATGCCGCATAGTTAAGCCAGTATACACTCCGCTATCGCTACGTGACTGGGTCATGGCTGCGC
CCCGACACCCGCCAACACCCGCTGACGCGCCCTGACGGGCTTGTCTGCTCCCGGCATCCGCTTA
CAGACAAGCTGTGACCGTCTCCGGGAGCTGCATGTGTCAGAGGTTTTCACCGTCATCACCGAA
ACGCGCGAGGCAGCTGCGGTAAAGCTCATCAGCGTGGTCGTGAAGCGATTCACAGATGTCTGC
CTGTTCATCCGCGTCCAGCTCGTTGAGTTTCTCCAGAAGCGTTAATGTCTGGCTTCTGATAAAG
CGGGCCATGTTAAGGGCGGTTTTTTCCTGTTTGGTCACTGATGCCTCCGTGTAAGGGGGATTTC
TGTTCATGGGGGTAATGATACCGATGAAACGAGAGAGGATGCTCACGATACGGGTTACTGATG
ATGAACATGCCCGGTTACTGGAACGTTGTGAGGGTAAACAACTGGCGGTATGGATGCGGCGGG
ACCAGAGAAAAATCACTCAGGGTCAATGCCAGCGCTTCGTTAATACAGATGTAGGTGTTCCAC
AGGGTAGCCAGCAGCATCCTGCGATGCAGATCCGGAACATAATGGTGCAGGGCGCTGACTTCC
GCGTTTCCAGACTTTACGAAACACGGAAACCGAAGACCATTCATGTTGTTGCTCAGGTCGCAG
ACGTTTTGCAGCAGCAGTCGCTTCACGTTCGCTCGCGTATCGGTGATTCATTCTGCTAACCAGT
AAGGCAACCCCGCCAGCCTAGCCGGGTCCTCAACGACAGGAGCACGATCATGCGCACCCGTG
GGGCCGCCATGCCGGCGATAATGGCCTGCTTCTCGCCGAAACGTTTGGTGGCGGGACCAGTGA
CGAAGGCTTGAGCGAGGGCGTGCAAGATTCCGAATACCGCAAGCGACAGGCCGATCATCGTC
GCGCTCCAGCGAAAGCGGTCCTCGCCGAAAATGACCCAGAGCGCTGCCGGCACCTGTCCTACG
AGTTGCATGATAAAGAAGACAGTCATAAGTGCGGCGACGATAGTCATGCCCCGCGCCCACCGG
AAGGAGCTGACTGGGTTGAAGGCTCTCAAGGGCATCGGTCGAGATCCCGGTGCCTAATGAGTG
AGCTAACTTACATTAATTGCGTTGCGCTCACTGCCCGCTTTCCAGTCGGGAAACCTGTCGTGCC
AGCTGCATTAATGAATCGGCCAACGCGCGGGGAGAGGCGGTTTGCGTATTGGGCGCCAGGGTG
GTTTTTCTTTTCACCAGTGAGACGGGCAACAGCTGATTGCCCTTCACCGCCTGGCCCTGAGAGA
GTTGCAGCAAGCGGTCCACGCTGGTTTGCCCCAGCAGGCGAAAATCCTGTTTGATGGTGGTTA
ACGGCGGGATATAACATGAGCTGTCTTCGGTATCGTCGTATCCCACTACCGAGATATCCGCAC
CAACGCGCAGCCCGGACTCGGTAATGGCGCGCATTGCGCCCAGCGCCATCTGATCGTTGGCAA
CCAGCATCGCAGTGGGAACGATGCCCTCATTCAGCATTTGCATGGTTTGTTGAAAACCGGACA
TGGCACTCCAGTCGCCTTCCCGTTCCGCTATCGGCTGAATTTGATTGCGAGTGAGATATTTATG
CCAGCCAGCCAGACGCAGACGCGCCGAGACAGAACTTAATGGGCCCGCTAACAGCGCGATTT
GCTGGTGACCCAATGCGACCAGATGCTCCACGCCCAGTCGCGTACCGTCTTCATGGGAGAAAA
TAATACTGTTGATGGGTGTCTGGTCAGAGACATCAAGAAATAACGCCGGAACATTAGTGCAGG
CAGCTTCCACAGCAATGGCATCCTGGTCATCCAGCGGATAGTTAATGATCAGCCCACTGACGC
GTTGCGCGAGAAGATTGTGCACCGCCGCTTTACAGGCTTCGACGCCGCTTCGTTCTACCATCGA
CACCACCACGCTGGCACCCAGTTGATCGGCGCGAGATTTAATCGCCGCGACAATTTGCGACGG
CGCGTGCAGGGCCAGACTGGAGGTGGCAACGCCAATCAGCAACGACTGTTTGCCCGCCAGTTG
TTGTGCCACGCGGTTGGGAATGTAATTCAGCTCCGCCATCGCCGCTTCCACTTTTTCCCGCGTTT
TCGCAGAAACGTGGCTGGCCTGGTTCACCACGCGGGAAACGGTCTGATAAGAGACACCGGCAT
ACTCTGCGACATCGTATAACGTTACTGGTTTCACATTCACCACCCTGAATTGACTCTCTTCCGG
GCGCTATCATGCCATACCGCGAAAGGTTTTGCGCCATTCGATGGTGTCCGGGATCTCGACGCTC
TCCCTTATGCGACTCCTGCATTAGGAAGCAGCCCAGTAGTAGGTTGAGGCCGTTGAGCACCGC
CGCCGCAAGGAATGGTGCATGCAAGGAGATGGCGCCCAACAGTCCCCCGGCCACGGGGCCTG
CCACCATACCCACGCCGAAACAAGCGCTCATGAGCCCGAAGTGGCGAGCCCGATCTTCCCCAT
CGGTGATGTCGGCGATATAGGCGCCAGCAACCGCACCTGTGGCGCCGGTGATGCCGGCCACGA
TGCGTCCGGCGTAGAGGATCGAGATCTCGATCCCGCGAAATTAATACGACTCACTATAGGGGA
ATTGTGAGCGGATAACAATTCCCCTCTAGAAATAATTTTGTTTAACTTTAAGAAGGAGATATAC
CATGGGCAGCAGCCATCATCATCATCATCACAGCAGCGGCCTGGTGCCGCGCGGCAGCCATAT
GGCTAGTATGGATCTGGATGCAGTAAGGATTAAAGTGGACACAGTAAATGCAAAACCGGGAG
ACACAGTAAATATACCTGTAAGATTCAGTGGTATACCATCCAAGGGAATAGCAAACTGTGACT
TTGTATACAGCTATGACCCGAATGTACTTGAGATAATAGAGATAAAACCGGGAGAATTGATAG
TTGACCCGAATCCTACCAAGAGCTTTGATACTGCAGTATATCCTGACAGAAAGATGATAGTAT
TCCTGTTTGCGGAAGACAGCGGAACAGGAGCGTATGCAATAACTAAAGACGGAGTATTTGCTA
CGATAGTAGCGAAAGTAAAAGAAGGAGCACCTAACGGGCTCAGTGTAATCAAATTTGTAGAA
GTAGGCGGATTTGCGAACAATGACCTTGTAGAACAGAAGACACAGTTCTTTGACGGTGGAGTA
AATGTTGGAGATACAACAGAACCTGCAACACCTACAACACCTGTAACAACACCGACAACAAC
AGATGATCTAGATGCAGCTAGCATGTCGCAAATCATGTACAACTACCCCGCGATGTTGGGTCA
CGCCGGGGATATGGCCGGATATGCCGGCACGCTGCAGAGCTTGGGTGCCGAGATCGCCGTGGA
GCAGGCCGCGTTGCAGAGTGCGTGGCAGGGCGATACCGGGATCACGTATCAGGCGTGGCAGG
CACAGTGGAACCAGGCCATGGAAGATTTGGTGCGGGCCTATCATGCGATGTCCAGCACCCATG
AAGCCAACACCATGGCGATGATGGCCCGCGACACGGCCGAAGCCGCCAAATGGGGCGGCTAG
GCGGCCGCACTCGAGCACCACCACCACCACCACTGAGATCCGGCTGCTAACAAAGCCCGAAA
GGAAGCTGAGTTGGCTGCTGCCACCGCTGAGCAATAACTAGCATAACCCCTTGGGGCCTCTAA
ACGGGTCTTGAGGGGTTTTTTGCTGAAAGGAGGAACTATATCCGGAT
Protein sequence- Ecoli-pET28[6xHis-CthermoCohesin (underlined) -m.tbRv0288
(M. tb. antigen - bold)].
(SEQ ID NO: 185)
MGSSHHHHHHSSGLVPRGSHMASMDLDAVRIKVDTVNAKPGDTVNIPVRFSGIPSKGIANC
DFVYSYDPNVLEIIEIKPGELIVDPNPTKSFDTAVYPDRKMIVFLFAEDSGTGAYAITKDGVFATIVA
KVKEGAPNGLSVIKFVEVGGFANNDLVEQKTQFFDGGVNVGDTTEPATPTTPVTTPTTTDDLDAAS
MSQIMYNYPAMLGHAGDMAGYAGTLQSLGAEIAVEQAALQSAWQGDTGITYQAWQAQWN
QAMEDLVRAYHAMSSTHEANTMAMMARDTAEAAKWGG
Ag85BΔ41: C2200: Ecoli-pET28[6xHis-CthermoCohesin (underlined) -m.tbAg85BDel41
(M. tb. antigen)].
(SEQ ID NO: 186)
TGGCGAATGGGACGCGCCCTGTAGCGGCGCATTAAGCGCGGCGGGTGTGGTGGTTACG
CGCAGCGTGACCGCTACACTTGCCAGCGCCCTAGCGCCCGCTCCTTTCGCTTTCTTCCCTTCCTT
TCTCGCCACGTTCGCCGGCTTTCCCCGTCAAGCTCTAAATCGGGGGCTCCCTTTAGGGTTCCGA
TTTAGTGCTTTACGGCACCTCGACCCCAAAAAACTTGATTAGGGTGATGGTTCACGTAGTGGGC
CATCGCCCTGATAGACGGTTTTTCGCCCTTTGACGTTGGAGTCCACGTTCTTTAATAGTGGACT
CTTGTTCCAAACTGGAACAACACTCAACCCTATCTCGGTCTATTCTTTTGATTTATAAGGGATTT
TGCCGATTTCGGCCTATTGGTTAAAAAATGAGCTGATTTAACAAAAATTTAACGCGAATTTTAA
CAAAATATTAACGTTTACAATTTCAGGTGGCACTTTTCGGGGAAATGTGCGCGGAACCCCTATT
TGTTTATTTTTCTAAATACATTCAAATATGTATCCGCTCATGAATTAATTCTTAGAAAAACTCAT
CGAGCATCAAATGAAACTGCAATTTATTCATATCAGGATTATCAATACCATATTTTTGAAAAAG
CCGTTTCTGTAATGAAGGAGAAAACTCACCGAGGCAGTTCCATAGGATGGCAAGATCCTGGTA
TCGGTCTGCGATTCCGACTCGTCCAACATCAATACAACCTATTAATTTCCCCTCGTCAAAAATA
AGGTTATCAAGTGAGAAATCACCATGAGTGACGACTGAATCCGGTGAGAATGGCAAAAGTTTA
TGCATTTCTTTCCAGACTTGTTCAACAGGCCAGCCATTACGCTCGTCATCAAAATCACTCGCAT
CAACCAAACCGTTATTCATTCGTGATTGCGCCTGAGCGAGACGAAATACGCGATCGCTGTTAA
AAGGACAATTACAAACAGGAATCGAATGCAACCGGCGCAGGAACACTGCCAGCGCATCAACA
ATATTTTCACCTGAATCAGGATATTCTTCTAATACCTGGAATGCTGTTTTCCCGGGGATCGCAG
TGGTGAGTAACCATGCATCATCAGGAGTACGGATAAAATGCTTGATGGTCGGAAGAGGCATAA
ATTCCGTCAGCCAGTTTAGTCTGACCATCTCATCTGTAACATCATTGGCAACGCTACCTTTGCC
ATGTTTCAGAAACAACTCTGGCGCATCGGGCTTCCCATACAATCGATAGATTGTCGCACCTGAT
TGCCCGACATTATCGCGAGCCCATTTATACCCATATAAATCAGCATCCATGTTGGAATTTAATC
GCGGCCTAGAGCAAGACGTTTCCCGTTGAATATGGCTCATAACACCCCTTGTATTACTGTTTAT
GTAAGCAGACAGTTTTATTGTTCATGACCAAAATCCCTTAACGTGAGTTTTCGTTCCACTGAGC
GTCAGACCCCGTAGAAAAGATCAAAGGATCTTCTTGAGATCCTTTTTTTCTGCGCGTAATCTGC
TGCTTGCAAACAAAAAAACCACCGCTACCAGCGGTGGTTTGTTTGCCGGATCAAGAGCTACCA
ACTCTTTTTCCGAAGGTAACTGGCTTCAGCAGAGCGCAGATACCAAATACTGTCCTTCTAGTGT
AGCCGTAGTTAGGCCACCACTTCAAGAACTCTGTAGCACCGCCTACATACCTCGCTCTGCTAAT
CCTGTTACCAGTGGCTGCTGCCAGTGGCGATAAGTCGTGTCTTACCGGGTTGGACTCAAGACG
ATAGTTACCGGATAAGGCGCAGCGGTCGGGCTGAACGGGGGGTTCGTGCACACAGCCCAGCTT
GGAGCGAACGACCTACACCGAACTGAGATACCTACAGCGTGAGCTATGAGAAAGCGCCACGC
TTCCCGAAGGGAGAAAGGCGGACAGGTATCCGGTAAGCGGCAGGGTCGGAACAGGAGAGCGC
ACGAGGGAGCTTCCAGGGGGAAACGCCTGGTATCTTTATAGTCCTGTCGGGTTTCGCCACCTCT
GACTTGAGCGTCGATTTTTGTGATGCTCGTCAGGGGGGCGGAGCCTATGGAAAAACGCCAGCA
ACGCGGCCTTTTTACGGTTCCTGGCCTTTTGCTGGCCTTTTGCTCACATGTTCTTTCCTGCGTTA
TCCCCTGATTCTGTGGATAACCGTATTACCGCCTTTGAGTGAGCTGATACCGCTCGCCGCAGCC
GAACGACCGAGCGCAGCGAGTCAGTGAGCGAGGAAGCGGAAGAGCGCCTGATGCGGTATTTT
CTCCTTACGCATCTGTGCGGTATTTCACACCGCATATATGGTGCACTCTCAGTACAATCTGCTC
TGATGCCGCATAGTTAAGCCAGTATACACTCCGCTATCGCTACGTGACTGGGTCATGGCTGCGC
CCCGACACCCGCCAACACCCGCTGACGCGCCCTGACGGGCTTGTCTGCTCCCGGCATCCGCTTA
CAGACAAGCTGTGACCGTCTCCGGGAGCTGCATGTGTCAGAGGTTTTCACCGTCATCACCGAA
ACGCGCGAGGCAGCTGCGGTAAAGCTCATCAGCGTGGTCGTGAAGCGATTCACAGATGTCTGC
CTGTTCATCCGCGTCCAGCTCGTTGAGTTTCTCCAGAAGCGTTAATGTCTGGCTTCTGATAAAG
CGGGCCATGTTAAGGGCGGTTTTTTCCTGTTTGGTCACTGATGCCTCCGTGTAAGGGGGATTTC
TGTTCATGGGGGTAATGATACCGATGAAACGAGAGAGGATGCTCACGATACGGGTTACTGATG
ATGAACATGCCCGGTTACTGGAACGTTGTGAGGGTAAACAACTGGCGGTATGGATGCGGCGGG
ACCAGAGAAAAATCACTCAGGGTCAATGCCAGCGCTTCGTTAATACAGATGTAGGTGTTCCAC
AGGGTAGCCAGCAGCATCCTGCGATGCAGATCCGGAACATAATGGTGCAGGGCGCTGACTTCC
GCGTTTCCAGACTTTACGAAACACGGAAACCGAAGACCATTCATGTTGTTGCTCAGGTCGCAG
ACGTTTTGCAGCAGCAGTCGCTTCACGTTCGCTCGCGTATCGGTGATTCATTCTGCTAACCAGT
AAGGCAACCCCGCCAGCCTAGCCGGGTCCTCAACGACAGGAGCACGATCATGCGCACCCGTG
GGGCCGCCATGCCGGCGATAATGGCCTGCTTCTCGCCGAAACGTTTGGTGGCGGGACCAGTGA
CGAAGGCTTGAGCGAGGGCGTGCAAGATTCCGAATACCGCAAGCGACAGGCCGATCATCGTC
GCGCTCCAGCGAAAGCGGTCCTCGCCGAAAATGACCCAGAGCGCTGCCGGCACCTGTCCTACG
AGTTGCATGATAAAGAAGACAGTCATAAGTGCGGCGACGATAGTCATGCCCCGCGCCCACCGG
AAGGAGCTGACTGGGTTGAAGGCTCTCAAGGGCATCGGTCGAGATCCCGGTGCCTAATGAGTG
AGCTAACTTACATTAATTGCGTTGCGCTCACTGCCCGCTTTCCAGTCGGGAAACCTGTCGTGCC
AGCTGCATTAATGAATCGGCCAACGCGCGGGGAGAGGCGGTTTGCGTATTGGGCGCCAGGGTG
GTTTTTCTTTTCACCAGTGAGACGGGCAACAGCTGATTGCCCTTCACCGCCTGGCCCTGAGAGA
GTTGCAGCAAGCGGTCCACGCTGGTTTGCCCCAGCAGGCGAAAATCCTGTTTGATGGTGGTTA
ACGGCGGGATATAACATGAGCTGTCTTCGGTATCGTCGTATCCCACTACCGAGATATCCGCAC
CAACGCGCAGCCCGGACTCGGTAATGGCGCGCATTGCGCCCAGCGCCATCTGATCGTTGGCAA
CCAGCATCGCAGTGGGAACGATGCCCTCATTCAGCATTTGCATGGTTTGTTGAAAACCGGACA
TGGCACTCCAGTCGCCTTCCCGTTCCGCTATCGGCTGAATTTGATTGCGAGTGAGATATTTATG
CCAGCCAGCCAGACGCAGACGCGCCGAGACAGAACTTAATGGGCCCGCTAACAGCGCGATTT
GCTGGTGACCCAATGCGACCAGATGCTCCACGCCCAGTCGCGTACCGTCTTCATGGGAGAAAA
TAATACTGTTGATGGGTGTCTGGTCAGAGACATCAAGAAATAACGCCGGAACATTAGTGCAGG
CAGCTTCCACAGCAATGGCATCCTGGTCATCCAGCGGATAGTTAATGATCAGCCCACTGACGC
GTTGCGCGAGAAGATTGTGCACCGCCGCTTTACAGGCTTCGACGCCGCTTCGTTCTACCATCGA
CACCACCACGCTGGCACCCAGTTGATCGGCGCGAGATTTAATCGCCGCGACAATTTGCGACGG
CGCGTGCAGGGCCAGACTGGAGGTGGCAACGCCAATCAGCAACGACTGTTTGCCCGCCAGTTG
TTGTGCCACGCGGTTGGGAATGTAATTCAGCTCCGCCATCGCCGCTTCCACTTTTTCCCGCGTTT
TCGCAGAAACGTGGCTGGCCTGGTTCACCACGCGGGAAACGGTCTGATAAGAGACACCGGCAT
ACTCTGCGACATCGTATAACGTTACTGGTTTCACATTCACCACCCTGAATTGACTCTCTTCCGG
GCGCTATCATGCCATACCGCGAAAGGTTTTGCGCCATTCGATGGTGTCCGGGATCTCGACGCTC
TCCCTTATGCGACTCCTGCATTAGGAAGCAGCCCAGTAGTAGGTTGAGGCCGTTGAGCACCGC
CGCCGCAAGGAATGGTGCATGCAAGGAGATGGCGCCCAACAGTCCCCCGGCCACGGGGCCTG
CCACCATACCCACGCCGAAACAAGCGCTCATGAGCCCGAAGTGGCGAGCCCGATCTTCCCCAT
CGGTGATGTCGGCGATATAGGCGCCAGCAACCGCACCTGTGGCGCCGGTGATGCCGGCCACGA
TGCGTCCGGCGTAGAGGATCGAGATCTCGATCCCGCGAAATTAATACGACTCACTATAGGGGA
ATTGTGAGCGGATAACAATTCCCCTCTAGAAATAATTTTGTTTAACTTTAAGAAGGAGATATAC
CATGGGCAGCAGCCATCATCATCATCATCACAGCAGCGGCCTGGTGCCGCGCGGCAGCCATAT
GGCTAGTATGGATCTGGATGCAGTAAGGATTAAAGTGGACACAGTAAATGCAAAACCGGGAG
ACACAGTAAATATACCTGTAAGATTCAGTGGTATACCATCCAAGGGAATAGCAAACTGTGACT
TTGTATACAGCTATGACCCGAATGTACTTGAGATAATAGAGATAAAACCGGGAGAATTGATAG
TTGACCCGAATCCTACCAAGAGCTTTGATACTGCAGTATATCCTGACAGAAAGATGATAGTAT
TCCTGTTTGCGGAAGACAGCGGAACAGGAGCGTATGCAATAACTAAAGACGGAGTATTTGCTA
CGATAGTAGCGAAAGTAAAAGAAGGAGCACCTAACGGGCTCAGTGTAATCAAATTTGTAGAA
GTAGGCGGATTTGCGAACAATGACCTTGTAGAACAGAAGACACAGTTCTTTGACGGTGGAGTA
AATGTTGGAGATACAACAGAACCTGCAACACCTACAACACCTGTAACAACACCGACAACAAC
AGATGATCTAGATGCAGCTAGCTCCCGGCCGGGGCTGCCGGTCGAGTACCTGCAGGTGCCGTC
GCCGTCGATGGGCCGCGACATCAAGGTTCAGTTCCAGAGCGGTGGGAACAACTCACCTGCGGT
TTATCTGCTCGACGGCCTGCGCGCCCAAGACGACTACAACGGCTGGGATATCAACACCCCGGC
GTTCGAGTGGTACTACCAGTCGGGACTGTCGATAGTCATGCCGGTCGGCGGGCAGTCCAGCTT
CTACAGCGACTGGTACAGCCCGGCCTGCGGTAAGGCTGGCTGCCAGACTTACAAGTGGGAAAC
CTTCCTGACCAGCGAGCTGCCGCAATGGTTGTCCGCCAACAGGGCCGTGAAGCCCACCGGCAG
CGCTGCAATCGGCTTGTCGATGGCCGGCTCGTCGGCAATGATCTTGGCCGCCTACCACCCCCAG
CAGTTCATCTACGCCGGCTCGCTGTCGGCCCTGCTGGACCCCTCTCAGGGGATGGGGCCTAGCC
TGATCGGCCTCGCGATGGGTGACGCCGGCGGTTACAAGGCCGCAGACATGTGGGGTCCCTCGA
GTGACCCGGCATGGGAGCGCAACGACCCTACGCAGCAGATCCCCAAGCTGGTCGCAAACAAC
ACCCGGCTATGGGTTTATTGCGGGAACGGCACCCCGAACGAGTTGGGCGGTGCCAACATACCC
GCCGAGTTCTTGGAGAACTTCGTTCGTAGCAGCAACCTGAAGTTCCAGGATGCGTACAACGCC
GCGGGCGGGCACAACGCCGTGTTCAACTTCCCGCCCAACGGCACGCACAGCTGGGAGTACTGG
GGCGCTCAGCTCAACGCCATGAAGGGTGACCTGCAGAGTTCGTTAGGCGCCGGCTGAGCGGCC
GCACTCGAGCACCACCACCACCACCACTGAGATCCGGCTGCTAACAAAGCCCGAAAGGAAGC
TGAGTTGGCTGCTGCCACCGCTGAGCAATAACTAGCATAACCCCTTGGGGCCTCTAAACGGGT
CTTGAGGGGTTTTTTGCTGAAAGGAGGAACTATATCCGGAT
Protein sequence - Ecoli-pET28[6xHis-CthermoCohesin (underlined) -m.tbAg85BDel41
(M. tb. antigen - bold)].
(SEQ ID NO: 187)
MGSSHHHHHHSSGLVPRGSHMASMDLDAVRIKVDTVNAKPGDTVNIPVRFSGIPSKGIANC
DFVYSYDPNVLEIIEIKPGELIVDPNPTKSFDTAVYPDRKMIVFLFAEDSGTGAYAITKDGVFATIVA
KVKEGAPNGLSVIKFVEVGGFANNDLVEQKTQFFDGGVNVGDTTEPATPTTPVTTPTTTDDLDAAS
SRPGLPVEYLQVPSPSMGRDIKVQFQSGGNNSPAVYLLDGLRAQDDYNGWDINTPAFEWYYQ
SGLSIVMPVGGQSSFYSDWYSPACGKAGCQTYKWETFLTSELPQWLSANRAVKPTGSAAIGL
SMAGSSAMILAAYHPQQFIYAGSLSALLDPSQGMGPSLIGLAMGDAGGYKAADMWGPSSDPA
WERNDPTQQIPKLVANNTRLWVYCGNGTPNELGGANIPAEFLENFVRSSNLKCFQDAYNAAG
GHNAVFNFPPNGTHSWEYWGAQLNAMKGDLQSSLGAG
CFP10: C1254: Ecoli-pET28 [6xHis-Cohesin (underlined) -m.tbCFP10
(M. tb. antigen)].
(SEQ ID NO: 188)
TGGCGAATGGGACGCGCCCTGTAGCGGCGCATTAAGCGCGGCGGGTGTGGTGGTTACG
CGCAGCGTGACCGCTACACTTGCCAGCGCCCTAGCGCCCGCTCCTTTCGCTTTCTTCCCTTCCTT
TCTCGCCACGTTCGCCGGCTTTCCCCGTCAAGCTCTAAATCGGGGGCTCCCTTTAGGGTTCCGA
TTTAGTGCTTTACGGCACCTCGACCCCAAAAAACTTGATTAGGGTGATGGTTCACGTAGTGGGC
CATCGCCCTGATAGACGGTTTTTCGCCCTTTGACGTTGGAGTCCACGTTCTTTAATAGTGGACT
CTTGTTCCAAACTGGAACAACACTCAACCCTATCTCGGTCTATTCTTTTGATTTATAAGGGATTT
TGCCGATTTCGGCCTATTGGTTAAAAAATGAGCTGATTTAACAAAAATTTAACGCGAATTTTAA
CAAAATATTAACGTTTACAATTTCAGGTGGCACTTTTCGGGGAAATGTGCGCGGAACCCCTATT
TGTTTATTTTTCTAAATACATTCAAATATGTATCCGCTCATGAATTAATTCTTAGAAAAACTCAT
CGAGCATCAAATGAAACTGCAATTTATTCATATCAGGATTATCAATACCATATTTTTGAAAAAG
CCGTTTCTGTAATGAAGGAGAAAACTCACCGAGGCAGTTCCATAGGATGGCAAGATCCTGGTA
TCGGTCTGCGATTCCGACTCGTCCAACATCAATACAACCTATTAATTTCCCCTCGTCAAAAATA
AGGTTATCAAGTGAGAAATCACCATGAGTGACGACTGAATCCGGTGAGAATGGCAAAAGTTTA
TGCATTTCTTTCCAGACTTGTTCAACAGGCCAGCCATTACGCTCGTCATCAAAATCACTCGCAT
CAACCAAACCGTTATTCATTCGTGATTGCGCCTGAGCGAGACGAAATACGCGATCGCTGTTAA
AAGGACAATTACAAACAGGAATCGAATGCAACCGGCGCAGGAACACTGCCAGCGCATCAACA
ATATTTTCACCTGAATCAGGATATTCTTCTAATACCTGGAATGCTGTTTTCCCGGGGATCGCAG
TGGTGAGTAACCATGCATCATCAGGAGTACGGATAAAATGCTTGATGGTCGGAAGAGGCATAA
ATTCCGTCAGCCAGTTTAGTCTGACCATCTCATCTGTAACATCATTGGCAACGCTACCTTTGCC
ATGTTTCAGAAACAACTCTGGCGCATCGGGCTTCCCATACAATCGATAGATTGTCGCACCTGAT
TGCCCGACATTATCGCGAGCCCATTTATACCCATATAAATCAGCATCCATGTTGGAATTTAATC
GCGGCCTAGAGCAAGACGTTTCCCGTTGAATATGGCTCATAACACCCCTTGTATTACTGTTTAT
GTAAGCAGACAGTTTTATTGTTCATGACCAAAATCCCTTAACGTGAGTTTTCGTTCCACTGAGC
GTCAGACCCCGTAGAAAAGATCAAAGGATCTTCTTGAGATCCTTTTTTTCTGCGCGTAATCTGC
TGCTTGCAAACAAAAAAACCACCGCTACCAGCGGTGGTTTGTTTGCCGGATCAAGAGCTACCA
ACTCTTTTTCCGAAGGTAACTGGCTTCAGCAGAGCGCAGATACCAAATACTGTCCTTCTAGTGT
AGCCGTAGTTAGGCCACCACTTCAAGAACTCTGTAGCACCGCCTACATACCTCGCTCTGCTAAT
CCTGTTACCAGTGGCTGCTGCCAGTGGCGATAAGTCGTGTCTTACCGGGTTGGACTCAAGACG
ATAGTTACCGGATAAGGCGCAGCGGTCGGGCTGAACGGGGGGTTCGTGCACACAGCCCAGCTT
GGAGCGAACGACCTACACCGAACTGAGATACCTACAGCGTGAGCTATGAGAAAGCGCCACGC
TTCCCGAAGGGAGAAAGGCGGACAGGTATCCGGTAAGCGGCAGGGTCGGAACAGGAGAGCGC
ACGAGGGAGCTTCCAGGGGGAAACGCCTGGTATCTTTATAGTCCTGTCGGGTTTCGCCACCTCT
GACTTGAGCGTCGATTTTTGTGATGCTCGTCAGGGGGGCGGAGCCTATGGAAAAACGCCAGCA
ACGCGGCCTTTTTACGGTTCCTGGCCTTTTGCTGGCCTTTTGCTCACATGTTCTTTCCTGCGTTA
TCCCCTGATTCTGTGGATAACCGTATTACCGCCTTTGAGTGAGCTGATACCGCTCGCCGCAGCC
GAACGACCGAGCGCAGCGAGTCAGTGAGCGAGGAAGCGGAAGAGCGCCTGATGCGGTATTTT
CTCCTTACGCATCTGTGCGGTATTTCACACCGCATATATGGTGCACTCTCAGTACAATCTGCTC
TGATGCCGCATAGTTAAGCCAGTATACACTCCGCTATCGCTACGTGACTGGGTCATGGCTGCGC
CCCGACACCCGCCAACACCCGCTGACGCGCCCTGACGGGCTTGTCTGCTCCCGGCATCCGCTTA
CAGACAAGCTGTGACCGTCTCCGGGAGCTGCATGTGTCAGAGGTTTTCACCGTCATCACCGAA
ACGCGCGAGGCAGCTGCGGTAAAGCTCATCAGCGTGGTCGTGAAGCGATTCACAGATGTCTGC
CTGTTCATCCGCGTCCAGCTCGTTGAGTTTCTCCAGAAGCGTTAATGTCTGGCTTCTGATAAAG
CGGGCCATGTTAAGGGCGGTTTTTTCCTGTTTGGTCACTGATGCCTCCGTGTAAGGGGGATTTC
TGTTCATGGGGGTAATGATACCGATGAAACGAGAGAGGATGCTCACGATACGGGTTACTGATG
ATGAACATGCCCGGTTACTGGAACGTTGTGAGGGTAAACAACTGGCGGTATGGATGCGGCGGG
ACCAGAGAAAAATCACTCAGGGTCAATGCCAGCGCTTCGTTAATACAGATGTAGGTGTTCCAC
AGGGTAGCCAGCAGCATCCTGCGATGCAGATCCGGAACATAATGGTGCAGGGCGCTGACTTCC
GCGTTTCCAGACTTTACGAAACACGGAAACCGAAGACCATTCATGTTGTTGCTCAGGTCGCAG
ACGTTTTGCAGCAGCAGTCGCTTCACGTTCGCTCGCGTATCGGTGATTCATTCTGCTAACCAGT
AAGGCAACCCCGCCAGCCTAGCCGGGTCCTCAACGACAGGAGCACGATCATGCGCACCCGTG
GGGCCGCCATGCCGGCGATAATGGCCTGCTTCTCGCCGAAACGTTTGGTGGCGGGACCAGTGA
CGAAGGCTTGAGCGAGGGCGTGCAAGATTCCGAATACCGCAAGCGACAGGCCGATCATCGTC
GCGCTCCAGCGAAAGCGGTCCTCGCCGAAAATGACCCAGAGCGCTGCCGGCACCTGTCCTACG
AGTTGCATGATAAAGAAGACAGTCATAAGTGCGGCGACGATAGTCATGCCCCGCGCCCACCGG
AAGGAGCTGACTGGGTTGAAGGCTCTCAAGGGCATCGGTCGAGATCCCGGTGCCTAATGAGTG
AGCTAACTTACATTAATTGCGTTGCGCTCACTGCCCGCTTTCCAGTCGGGAAACCTGTCGTGCC
AGCTGCATTAATGAATCGGCCAACGCGCGGGGAGAGGCGGTTTGCGTATTGGGCGCCAGGGTG
GTTTTTCTTTTCACCAGTGAGACGGGCAACAGCTGATTGCCCTTCACCGCCTGGCCCTGAGAGA
GTTGCAGCAAGCGGTCCACGCTGGTTTGCCCCAGCAGGCGAAAATCCTGTTTGATGGTGGTTA
ACGGCGGGATATAACATGAGCTGTCTTCGGTATCGTCGTATCCCACTACCGAGATATCCGCAC
CAACGCGCAGCCCGGACTCGGTAATGGCGCGCATTGCGCCCAGCGCCATCTGATCGTTGGCAA
CCAGCATCGCAGTGGGAACGATGCCCTCATTCAGCATTTGCATGGTTTGTTGAAAACCGGACA
TGGCACTCCAGTCGCCTTCCCGTTCCGCTATCGGCTGAATTTGATTGCGAGTGAGATATTTATG
CCAGCCAGCCAGACGCAGACGCGCCGAGACAGAACTTAATGGGCCCGCTAACAGCGCGATTT
GCTGGTGACCCAATGCGACCAGATGCTCCACGCCCAGTCGCGTACCGTCTTCATGGGAGAAAA
TAATACTGTTGATGGGTGTCTGGTCAGAGACATCAAGAAATAACGCCGGAACATTAGTGCAGG
CAGCTTCCACAGCAATGGCATCCTGGTCATCCAGCGGATAGTTAATGATCAGCCCACTGACGC
GTTGCGCGAGAAGATTGTGCACCGCCGCTTTACAGGCTTCGACGCCGCTTCGTTCTACCATCGA
CACCACCACGCTGGCACCCAGTTGATCGGCGCGAGATTTAATCGCCGCGACAATTTGCGACGG
CGCGTGCAGGGCCAGACTGGAGGTGGCAACGCCAATCAGCAACGACTGTTTGCCCGCCAGTTG
TTGTGCCACGCGGTTGGGAATGTAATTCAGCTCCGCCATCGCCGCTTCCACTTTTTCCCGCGTTT
TCGCAGAAACGTGGCTGGCCTGGTTCACCACGCGGGAAACGGTCTGATAAGAGACACCGGCAT
ACTCTGCGACATCGTATAACGTTACTGGTTTCACATTCACCACCCTGAATTGACTCTCTTCCGG
GCGCTATCATGCCATACCGCGAAAGGTTTTGCGCCATTCGATGGTGTCCGGGATCTCGACGCTC
TCCCTTATGCGACTCCTGCATTAGGAAGCAGCCCAGTAGTAGGTTGAGGCCGTTGAGCACCGC
CGCCGCAAGGAATGGTGCATGCAAGGAGATGGCGCCCAACAGTCCCCCGGCCACGGGGCCTG
CCACCATACCCACGCCGAAACAAGCGCTCATGAGCCCGAAGTGGCGAGCCCGATCTTCCCCAT
CGGTGATGTCGGCGATATAGGCGCCAGCAACCGCACCTGTGGCGCCGGTGATGCCGGCCACGA
TGCGTCCGGCGTAGAGGATCGAGATCTCGATCCCGCGAAATTAATACGACTCACTATAGGGGA
ATTGTGAGCGGATAACAATTCCCCTCTAGAAATAATTTTGTTTAACTTTAAGAAGGAGATATAC
CATGGGCAGCAGCCATCATCATCATCATCACAGCAGCGGCCTGGTGCCGCGCGGCAGCCATAT
GGCTAGTATGGATCTGGATGCAGTAAGGATTAAAGTGGACACAGTAAATGCAAAACCGGGAG
ACACAGTAAATATACCTGTAAGATTCAGTGGTATACCATCCAAGGGAATAGCAAACTGTGACT
TTGTATACAGCTATGACCCGAATGTACTTGAGATAATAGAGATAAAACCGGGAGAATTGATAG
TTGACCCGAATCCTACCAAGAGCTTTGATACTGCAGTATATCCTGACAGAAAGATGATAGTAT
TCCTGTTTGCGGAAGACAGCGGAACAGGAGCGTATGCAATAACTAAAGACGGAGTATTTGCTA
CGATAGTAGCGAAAGTAAAAGAAGGAGCACCTAACGGGCTCAGTGTAATCAAATTTGTAGAA
GTAGGCGGATTTGCGAACAATGACCTTGTAGAACAGAAGACACAGTTCTTTGACGGTGGAGTA
AATGTTGGAGATACAACAGAACCTGCAACACCTACAACACCTGTAACAACACCGACAACAAC
AGATGATCTAGATGCAGCTAGCATGGCAGAGATGAAGACCGATGCCGCTACCCTCGCGCA
GGAGGCAGGTAATTTCGAGCGGATCTCCGGCGACCTGAAAACCCAGATCGACCAGGTGG
AGTCGACGGCAGGTTCGTTGCAGGGCCAGTGGCGCGGCGCGGCGGGGACGGCCGCCCA
GGCCGCGGTGGTGCGCTTCCAAGAAGCAGCCAATAAGCAGAAGCAGGAACTCGACGAGA
TCTCGACGAATATTCGTCAGGCCGGCGTCCAATACTCGAGGGCCGACGAGGAGCAGCAG
CAGGCGCTGTCCTCGCAAATGGGCTTCTGAGCGGCCGCACTCGAGCACCACCACCACCA
CCACTGAGATCCGGCTGCTAACAAAGCCCGAAAGGAAGCTGAGTTGGCTGCTGCCACCGCTG
AGCAATAACTAGCATAACCCCTTGGGGCCTCTAAACGGGTCTTGAGGGGTTTTTTGCTGAAAG
GAGGAACTATATCCGGAT
Protein sequence - Ecoli-pET28[6xHis-Cohesin (underlined) -m.tbCFP10 (M. tb.
antigen - bold)].
(SEQ ID NO: 189)
MGSSHHHHHHSSGLVPRGSHMASMDLDAVRIKVDTVNAKPGDTVNIPVRFSGIPSKGIANC
DFVYSYDPNVLEIIEIKPGELIVDPNPTKSFDTAVYPDRKMIVFLFAEDSGTGAYAITKDGVFATIVA
KVKEGAPNGLSVIKFVEVGGFANNDLVEQKTQFFDGGVNVGDTTEPATPTTPVTTPTTTDDLDAAS
MAEMKTDAATLAQEAGNFERISGDLKTQIDQVESTAGSLQGQWRGAAGTAAQAAVVRFQE
AANKQKQELDEISTNIRQAGVQYSRADEEQQQALSSQMGF
ESAT6 - C1251 Ecoli-pET28[6xHis-Cohesin (underlined)-m.tbESAT6 (bold)];
(SEQ ID NO: 190)
TGGCGAATGGGACGCGCCCTGTAGCGGCGCATTAAGCGCGGCGGGTGTGGTGGTTACGCGCAG
CGTGACCGCTACACTTGCCAGCGCCCTAGCGCCCGCTCCTTTCGCTTTCTTCCCTTCCTTTCTCG
CCACGTTCGCCGGCTTTCCCCGTCAAGCTCTAAATCGGGGGCTCCCTTTAGGGTTCCGATTTAG
TGCTTTACGGCACCTCGACCCCAAAAAACTTGATTAGGGTGATGGTTCACGTAGTGGGCCATC
GCCCTGATAGACGGTTTTTCGCCCTTTGACGTTGGAGTCCACGTTCTTTAATAGTGGACTCTTGT
TCCAAACTGGAACAACACTCAACCCTATCTCGGTCTATTCTTTTGATTTATAAGGGATTTTGCC
GATTTCGGCCTATTGGTTAAAAAATGAGCTGATTTAACAAAAATTTAACGCGAATTTTAACAA
AATATTAACGTTTACAATTTCAGGTGGCACTTTTCGGGGAAATGTGCGCGGAACCCCTATTTGT
TTATTTTTCTAAATACATTCAAATATGTATCCGCTCATGAATTAATTCTTAGAAAAACTCATCG
AGCATCAAATGAAACTGCAATTTATTCATATCAGGATTATCAATACCATATTTTTGAAAAAGCC
GTTTCTGTAATGAAGGAGAAAACTCACCGAGGCAGTTCCATAGGATGGCAAGATCCTGGTATC
GGTCTGCGATTCCGACTCGTCCAACATCAATACAACCTATTAATTTCCCCTCGTCAAAAATAAG
GTTATCAAGTGAGAAATCACCATGAGTGACGACTGAATCCGGTGAGAATGGCAAAAGTTTATG
CATTTCTTTCCAGACTTGTTCAACAGGCCAGCCATTACGCTCGTCATCAAAATCACTCGCATCA
ACCAAACCGTTATTCATTCGTGATTGCGCCTGAGCGAGACGAAATACGCGATCGCTGTTAAAA
GGACAATTACAAACAGGAATCGAATGCAACCGGCGCAGGAACACTGCCAGCGCATCAACAAT
ATTTTCACCTGAATCAGGATATTCTTCTAATACCTGGAATGCTGTTTTCCCGGGGATCGCAGTG
GTGAGTAACCATGCATCATCAGGAGTACGGATAAAATGCTTGATGGTCGGAAGAGGCATAAAT
TCCGTCAGCCAGTTTAGTCTGACCATCTCATCTGTAACATCATTGGCAACGCTACCTTTGCCAT
GTTTCAGAAACAACTCTGGCGCATCGGGCTTCCCATACAATCGATAGATTGTCGCACCTGATTG
CCCGACATTATCGCGAGCCCATTTATACCCATATAAATCAGCATCCATGTTGGAATTTAATCGC
GGCCTAGAGCAAGACGTTTCCCGTTGAATATGGCTCATAACACCCCTTGTATTACTGTTTATGT
AAGCAGACAGTTTTATTGTTCATGACCAAAATCCCTTAACGTGAGTTTTCGTTCCACTGAGCGT
CAGACCCCGTAGAAAAGATCAAAGGATCTTCTTGAGATCCTTTTTTTCTGCGCGTAATCTGCTG
CTTGCAAACAAAAAAACCACCGCTACCAGCGGTGGTTTGTTTGCCGGATCAAGAGCTACCAAC
TCTTTTTCCGAAGGTAACTGGCTTCAGCAGAGCGCAGATACCAAATACTGTCCTTCTAGTGTAG
CCGTAGTTAGGCCACCACTTCAAGAACTCTGTAGCACCGCCTACATACCTCGCTCTGCTAATCC
TGTTACCAGTGGCTGCTGCCAGTGGCGATAAGTCGTGTCTTACCGGGTTGGACTCAAGACGAT
AGTTACCGGATAAGGCGCAGCGGTCGGGCTGAACGGGGGGTTCGTGCACACAGCCCAGCTTG
GAGCGAACGACCTACACCGAACTGAGATACCTACAGCGTGAGCTATGAGAAAGCGCCACGCT
TCCCGAAGGGAGAAAGGCGGACAGGTATCCGGTAAGCGGCAGGGTCGGAACAGGAGAGCGC
ACGAGGGAGCTTCCAGGGGGAAACGCCTGGTATCTTTATAGTCCTGTCGGGTTTCGCCACCTCT
GACTTGAGCGTCGATTTTTGTGATGCTCGTCAGGGGGGCGGAGCCTATGGAAAAACGCCAGCA
ACGCGGCCTTTTTACGGTTCCTGGCCTTTTGCTGGCCTTTTGCTCACATGTTCTTTCCTGCGTTA
TCCCCTGATTCTGTGGATAACCGTATTACCGCCTTTGAGTGAGCTGATACCGCTCGCCGCAGCC
GAACGACCGAGCGCAGCGAGTCAGTGAGCGAGGAAGCGGAAGAGCGCCTGATGCGGTATTTT
CTCCTTACGCATCTGTGCGGTATTTCACACCGCATATATGGTGCACTCTCAGTACAATCTGCTC
TGATGCCGCATAGTTAAGCCAGTATACACTCCGCTATCGCTACGTGACTGGGTCATGGCTGCGC
CCCGACACCCGCCAACACCCGCTGACGCGCCCTGACGGGCTTGTCTGCTCCCGGCATCCGCTTA
CAGACAAGCTGTGACCGTCTCCGGGAGCTGCATGTGTCAGAGGTTTTCACCGTCATCACCGAA
ACGCGCGAGGCAGCTGCGGTAAAGCTCATCAGCGTGGTCGTGAAGCGATTCACAGATGTCTGC
CTGTTCATCCGCGTCCAGCTCGTTGAGTTTCTCCAGAAGCGTTAATGTCTGGCTTCTGATAAAG
CGGGCCATGTTAAGGGCGGTTTTTTCCTGTTTGGTCACTGATGCCTCCGTGTAAGGGGGATTTC
TGTTCATGGGGGTAATGATACCGATGAAACGAGAGAGGATGCTCACGATACGGGTTACTGATG
ATGAACATGCCCGGTTACTGGAACGTTGTGAGGGTAAACAACTGGCGGTATGGATGCGGCGGG
ACCAGAGAAAAATCACTCAGGGTCAATGCCAGCGCTTCGTTAATACAGATGTAGGTGTTCCAC
AGGGTAGCCAGCAGCATCCTGCGATGCAGATCCGGAACATAATGGTGCAGGGCGCTGACTTCC
GCGTTTCCAGACTTTACGAAACACGGAAACCGAAGACCATTCATGTTGTTGCTCAGGTCGCAG
ACGTTTTGCAGCAGCAGTCGCTTCACGTTCGCTCGCGTATCGGTGATTCATTCTGCTAACCAGT
AAGGCAACCCCGCCAGCCTAGCCGGGTCCTCAACGACAGGAGCACGATCATGCGCACCCGTG
GGGCCGCCATGCCGGCGATAATGGCCTGCTTCTCGCCGAAACGTTTGGTGGCGGGACCAGTGA
CGAAGGCTTGAGCGAGGGCGTGCAAGATTCCGAATACCGCAAGCGACAGGCCGATCATCGTC
GCGCTCCAGCGAAAGCGGTCCTCGCCGAAAATGACCCAGAGCGCTGCCGGCACCTGTCCTACG
AGTTGCATGATAAAGAAGACAGTCATAAGTGCGGCGACGATAGTCATGCCCCGCGCCCACCGG
AAGGAGCTGACTGGGTTGAAGGCTCTCAAGGGCATCGGTCGAGATCCCGGTGCCTAATGAGTG
AGCTAACTTACATTAATTGCGTTGCGCTCACTGCCCGCTTTCCAGTCGGGAAACCTGTCGTGCC
AGCTGCATTAATGAATCGGCCAACGCGCGGGGAGAGGCGGTTTGCGTATTGGGCGCCAGGGTG
GTTTTTCTTTTCACCAGTGAGACGGGCAACAGCTGATTGCCCTTCACCGCCTGGCCCTGAGAGA
GTTGCAGCAAGCGGTCCACGCTGGTTTGCCCCAGCAGGCGAAAATCCTGTTTGATGGTGGTTA
ACGGCGGGATATAACATGAGCTGTCTTCGGTATCGTCGTATCCCACTACCGAGATATCCGCAC
CAACGCGCAGCCCGGACTCGGTAATGGCGCGCATTGCGCCCAGCGCCATCTGATCGTTGGCAA
CCAGCATCGCAGTGGGAACGATGCCCTCATTCAGCATTTGCATGGTTTGTTGAAAACCGGACA
TGGCACTCCAGTCGCCTTCCCGTTCCGCTATCGGCTGAATTTGATTGCGAGTGAGATATTTATG
CCAGCCAGCCAGACGCAGACGCGCCGAGACAGAACTTAATGGGCCCGCTAACAGCGCGATTT
GCTGGTGACCCAATGCGACCAGATGCTCCACGCCCAGTCGCGTACCGTCTTCATGGGAGAAAA
TAATACTGTTGATGGGTGTCTGGTCAGAGACATCAAGAAATAACGCCGGAACATTAGTGCAGG
CAGCTTCCACAGCAATGGCATCCTGGTCATCCAGCGGATAGTTAATGATCAGCCCACTGACGC
GTTGCGCGAGAAGATTGTGCACCGCCGCTTTACAGGCTTCGACGCCGCTTCGTTCTACCATCGA
CACCACCACGCTGGCACCCAGTTGATCGGCGCGAGATTTAATCGCCGCGACAATTTGCGACGG
CGCGTGCAGGGCCAGACTGGAGGTGGCAACGCCAATCAGCAACGACTGTTTGCCCGCCAGTTG
TTGTGCCACGCGGTTGGGAATGTAATTCAGCTCCGCCATCGCCGCTTCCACTTTTTCCCGCGTTT
TCGCAGAAACGTGGCTGGCCTGGTTCACCACGCGGGAAACGGTCTGATAAGAGACACCGGCAT
ACTCTGCGACATCGTATAACGTTACTGGTTTCACATTCACCACCCTGAATTGACTCTCTTCCGG
GCGCTATCATGCCATACCGCGAAAGGTTTTGCGCCATTCGATGGTGTCCGGGATCTCGACGCTC
TCCCTTATGCGACTCCTGCATTAGGAAGCAGCCCAGTAGTAGGTTGAGGCCGTTGAGCACCGC
CGCCGCAAGGAATGGTGCATGCAAGGAGATGGCGCCCAACAGTCCCCCGGCCACGGGGCCTG
CCACCATACCCACGCCGAAACAAGCGCTCATGAGCCCGAAGTGGCGAGCCCGATCTTCCCCAT
CGGTGATGTCGGCGATATAGGCGCCAGCAACCGCACCTGTGGCGCCGGTGATGCCGGCCACGA
TGCGTCCGGCGTAGAGGATCGAGATCTCGATCCCGCGAAATTAATACGACTCACTATAGGGGA
ATTGTGAGCGGATAACAATTCCCCTCTAGAAATAATTTTGTTTAACTTTAAGAAGGAGATATAC
CATGGGCAGCAGCCATCATCATCATCATCACAGCAGCGGCCTGGTGCCGCGCGGCAGCCATAT
GGCTAGTATGGATCTGGATGCAGTAAGGATTAAAGTGGACACAGTAAATGCAAAACCGGGAG
ACACAGTAAATATACCTGTAAGATTCAGTGGTATACCATCCAAGGGAATAGCAAACTGTGACT
TTGTATACAGCTATGACCCGAATGTACTTGAGATAATAGAGATAAAACCGGGAGAATTGATAG
TTGACCCGAATCCTACCAAGAGCTTTGATACTGCAGTATATCCTGACAGAAAGATGATAGTAT
TCCTGTTTGCGGAAGACAGCGGAACAGGAGCGTATGCAATAACTAAAGACGGAGTATTTGCTA
CGATAGTAGCGAAAGTAAAAGAAGGAGCACCTAACGGGCTCAGTGTAATCAAATTTGTAGAA
GTAGGCGGATTTGCGAACAATGACCTTGTAGAACAGAAGACACAGTTCTTTGACGGTGGAGTA
AATGTTGGAGATACAACAGAACCTGCAACACCTACAACACCTGTAACAACACCGACAACAAC
AGATGATCTAGATGCAGCTAGCATGACAGAGCAGCAGTGGAATTTCGCGGGTATCGAGGC
CGCGGCAAGCGCAATCCAGGGAAATGTCACGTCCATTCATTCCCTCCTTGACGAGGGGA
AGCAGTCCCTGACCAAGCTCGCAGCGGCCTGGGGCGGTAGCGGTTCGGAGGCGTACCAG
GGTGTCCAGCAAAAATGGGACGCCACGGCTACCGAGCTGAACAACGCGCTGCAGAACCT
GGCGCGGACGATCAGCGAAGCCGGTCAGGCAATGGCTTCGACCGAAGGCAACGTCACTG
GGATGTTCGCATAGGCGGCCGCACTCGAGCACCACCACCACCACCACTGAGATCCGGCTGCT
AACAAAGCCCGAAAGGAAGCTGAGTTGGCTGCTGCCACCGCTGAGCAATAACTAGCATAACC
CCTTGGGGCCTCTAAACGGGTCTTGAGGGGTTTTTTGCTGAAAGGAGGAACTATATCCGGAT
Protein sequence ESAT6 - C1251 Ecoli-pET28[6xHis-Cohesin (underlined)-m.tbESAT6]
(SEQ ID NO: 191)
MGSSHHHHHHSSGLVPRGSHMASMDLDAVRIKVDTVNAKPGDTVNIPVRFSGIPSKGIANCDFVYS
YDPNVLEIIEIKPGELIVDPNPTKSFDTAVYPDRKMIVFLFAEDSGTGAYAITKDGVFATIVAKVKEG
APNGLSVIKFVEVGGFANNDLVEQKTQFFDGGVNVGDTTEPATPTTPVTTPTTTDDLDAASMTEQ
QWNFAGIEAAASAIQGNVTSIHSLLDEGKQSLTKLAAAWGGSGSEAYQGVQQKWDATATEL
NNALQNLARTISEAGQAMASTEGNVTGMFA
Rv3478 - C1308 Ecoli-pET28[6xHis-Cohesin (underlined)-m.tbRv3478 (bold)];
(SEQ ID NO: 192)
TGGCGAATGGGACGCGCCCTGTAGCGGCGCATTAAGCGCGGCGGGTGTGGTGGTTACGCGCAG
CGTGACCGCTACACTTGCCAGCGCCCTAGCGCCCGCTCCTTTCGCTTTCTTCCCTTCCTTTCTCG
CCACGTTCGCCGGCTTTCCCCGTCAAGCTCTAAATCGGGGGCTCCCTTTAGGGTTCCGATTTAG
TGCTTTACGGCACCTCGACCCCAAAAAACTTGATTAGGGTGATGGTTCACGTAGTGGGCCATC
GCCCTGATAGACGGTTTTTCGCCCTTTGACGTTGGAGTCCACGTTCTTTAATAGTGGACTCTTGT
TCCAAACTGGAACAACACTCAACCCTATCTCGGTCTATTCTTTTGATTTATAAGGGATTTTGCC
GATTTCGGCCTATTGGTTAAAAAATGAGCTGATTTAACAAAAATTTAACGCGAATTTTAACAA
AATATTAACGTTTACAATTTCAGGTGGCACTTTTCGGGGAAATGTGCGCGGAACCCCTATTTGT
TTATTTTTCTAAATACATTCAAATATGTATCCGCTCATGAATTAATTCTTAGAAAAACTCATCG
AGCATCAAATGAAACTGCAATTTATTCATATCAGGATTATCAATACCATATTTTTGAAAAAGCC
GTTTCTGTAATGAAGGAGAAAACTCACCGAGGCAGTTCCATAGGATGGCAAGATCCTGGTATC
GGTCTGCGATTCCGACTCGTCCAACATCAATACAACCTATTAATTTCCCCTCGTCAAAAATAAG
GTTATCAAGTGAGAAATCACCATGAGTGACGACTGAATCCGGTGAGAATGGCAAAAGTTTATG
CATTTCTTTCCAGACTTGTTCAACAGGCCAGCCATTACGCTCGTCATCAAAATCACTCGCATCA
ACCAAACCGTTATTCATTCGTGATTGCGCCTGAGCGAGACGAAATACGCGATCGCTGTTAAAA
GGACAATTACAAACAGGAATCGAATGCAACCGGCGCAGGAACACTGCCAGCGCATCAACAAT
ATTTTCACCTGAATCAGGATATTCTTCTAATACCTGGAATGCTGTTTTCCCGGGGATCGCAGTG
GTGAGTAACCATGCATCATCAGGAGTACGGATAAAATGCTTGATGGTCGGAAGAGGCATAAAT
TCCGTCAGCCAGTTTAGTCTGACCATCTCATCTGTAACATCATTGGCAACGCTACCTTTGCCAT
GTTTCAGAAACAACTCTGGCGCATCGGGCTTCCCATACAATCGATAGATTGTCGCACCTGATTG
CCCGACATTATCGCGAGCCCATTTATACCCATATAAATCAGCATCCATGTTGGAATTTAATCGC
GGCCTAGAGCAAGACGTTTCCCGTTGAATATGGCTCATAACACCCCTTGTATTACTGTTTATGT
AAGCAGACAGTTTTATTGTTCATGACCAAAATCCCTTAACGTGAGTTTTCGTTCCACTGAGCGT
CAGACCCCGTAGAAAAGATCAAAGGATCTTCTTGAGATCCTTTTTTTCTGCGCGTAATCTGCTG
CTTGCAAACAAAAAAACCACCGCTACCAGCGGTGGTTTGTTTGCCGGATCAAGAGCTACCAAC
TCTTTTTCCGAAGGTAACTGGCTTCAGCAGAGCGCAGATACCAAATACTGTCCTTCTAGTGTAG
CCGTAGTTAGGCCACCACTTCAAGAACTCTGTAGCACCGCCTACATACCTCGCTCTGCTAATCC
TGTTACCAGTGGCTGCTGCCAGTGGCGATAAGTCGTGTCTTACCGGGTTGGACTCAAGACGAT
AGTTACCGGATAAGGCGCAGCGGTCGGGCTGAACGGGGGGTTCGTGCACACAGCCCAGCTTG
GAGCGAACGACCTACACCGAACTGAGATACCTACAGCGTGAGCTATGAGAAAGCGCCACGCT
TCCCGAAGGGAGAAAGGCGGACAGGTATCCGGTAAGCGGCAGGGTCGGAACAGGAGAGCGC
ACGAGGGAGCTTCCAGGGGGAAACGCCTGGTATCTTTATAGTCCTGTCGGGTTTCGCCACCTCT
GACTTGAGCGTCGATTTTTGTGATGCTCGTCAGGGGGGCGGAGCCTATGGAAAAACGCCAGCA
ACGCGGCCTTTTTACGGTTCCTGGCCTTTTGCTGGCCTTTTGCTCACATGTTCTTTCCTGCGTTA
TCCCCTGATTCTGTGGATAACCGTATTACCGCCTTTGAGTGAGCTGATACCGCTCGCCGCAGCC
GAACGACCGAGCGCAGCGAGTCAGTGAGCGAGGAAGCGGAAGAGCGCCTGATGCGGTATTTT
CTCCTTACGCATCTGTGCGGTATTTCACACCGCATATATGGTGCACTCTCAGTACAATCTGCTC
TGATGCCGCATAGTTAAGCCAGTATACACTCCGCTATCGCTACGTGACTGGGTCATGGCTGCGC
CCCGACACCCGCCAACACCCGCTGACGCGCCCTGACGGGCTTGTCTGCTCCCGGCATCCGCTTA
CAGACAAGCTGTGACCGTCTCCGGGAGCTGCATGTGTCAGAGGTTTTCACCGTCATCACCGAA
ACGCGCGAGGCAGCTGCGGTAAAGCTCATCAGCGTGGTCGTGAAGCGATTCACAGATGTCTGC
CTGTTCATCCGCGTCCAGCTCGTTGAGTTTCTCCAGAAGCGTTAATGTCTGGCTTCTGATAAAG
CGGGCCATGTTAAGGGCGGTTTTTTCCTGTTTGGTCACTGATGCCTCCGTGTAAGGGGGATTTC
TGTTCATGGGGGTAATGATACCGATGAAACGAGAGAGGATGCTCACGATACGGGTTACTGATG
ATGAACATGCCCGGTTACTGGAACGTTGTGAGGGTAAACAACTGGCGGTATGGATGCGGCGGG
ACCAGAGAAAAATCACTCAGGGTCAATGCCAGCGCTTCGTTAATACAGATGTAGGTGTTCCAC
AGGGTAGCCAGCAGCATCCTGCGATGCAGATCCGGAACATAATGGTGCAGGGCGCTGACTTCC
GCGTTTCCAGACTTTACGAAACACGGAAACCGAAGACCATTCATGTTGTTGCTCAGGTCGCAG
ACGTTTTGCAGCAGCAGTCGCTTCACGTTCGCTCGCGTATCGGTGATTCATTCTGCTAACCAGT
AAGGCAACCCCGCCAGCCTAGCCGGGTCCTCAACGACAGGAGCACGATCATGCGCACCCGTG
GGGCCGCCATGCCGGCGATAATGGCCTGCTTCTCGCCGAAACGTTTGGTGGCGGGACCAGTGA
CGAAGGCTTGAGCGAGGGCGTGCAAGATTCCGAATACCGCAAGCGACAGGCCGATCATCGTC
GCGCTCCAGCGAAAGCGGTCCTCGCCGAAAATGACCCAGAGCGCTGCCGGCACCTGTCCTACG
AGTTGCATGATAAAGAAGACAGTCATAAGTGCGGCGACGATAGTCATGCCCCGCGCCCACCGG
AAGGAGCTGACTGGGTTGAAGGCTCTCAAGGGCATCGGTCGAGATCCCGGTGCCTAATGAGTG
AGCTAACTTACATTAATTGCGTTGCGCTCACTGCCCGCTTTCCAGTCGGGAAACCTGTCGTGCC
AGCTGCATTAATGAATCGGCCAACGCGCGGGGAGAGGCGGTTTGCGTATTGGGCGCCAGGGTG
GTTTTTCTTTTCACCAGTGAGACGGGCAACAGCTGATTGCCCTTCACCGCCTGGCCCTGAGAGA
GTTGCAGCAAGCGGTCCACGCTGGTTTGCCCCAGCAGGCGAAAATCCTGTTTGATGGTGGTTA
ACGGCGGGATATAACATGAGCTGTCTTCGGTATCGTCGTATCCCACTACCGAGATATCCGCAC
CAACGCGCAGCCCGGACTCGGTAATGGCGCGCATTGCGCCCAGCGCCATCTGATCGTTGGCAA
CCAGCATCGCAGTGGGAACGATGCCCTCATTCAGCATTTGCATGGTTTGTTGAAAACCGGACA
TGGCACTCCAGTCGCCTTCCCGTTCCGCTATCGGCTGAATTTGATTGCGAGTGAGATATTTATG
CCAGCCAGCCAGACGCAGACGCGCCGAGACAGAACTTAATGGGCCCGCTAACAGCGCGATTT
GCTGGTGACCCAATGCGACCAGATGCTCCACGCCCAGTCGCGTACCGTCTTCATGGGAGAAAA
TAATACTGTTGATGGGTGTCTGGTCAGAGACATCAAGAAATAACGCCGGAACATTAGTGCAGG
CAGCTTCCACAGCAATGGCATCCTGGTCATCCAGCGGATAGTTAATGATCAGCCCACTGACGC
GTTGCGCGAGAAGATTGTGCACCGCCGCTTTACAGGCTTCGACGCCGCTTCGTTCTACCATCGA
CACCACCACGCTGGCACCCAGTTGATCGGCGCGAGATTTAATCGCCGCGACAATTTGCGACGG
CGCGTGCAGGGCCAGACTGGAGGTGGCAACGCCAATCAGCAACGACTGTTTGCCCGCCAGTTG
TTGTGCCACGCGGTTGGGAATGTAATTCAGCTCCGCCATCGCCGCTTCCACTTTTTCCCGCGTTT
TCGCAGAAACGTGGCTGGCCTGGTTCACCACGCGGGAAACGGTCTGATAAGAGACACCGGCAT
ACTCTGCGACATCGTATAACGTTACTGGTTTCACATTCACCACCCTGAATTGACTCTCTTCCGG
GCGCTATCATGCCATACCGCGAAAGGTTTTGCGCCATTCGATGGTGTCCGGGATCTCGACGCTC
TCCCTTATGCGACTCCTGCATTAGGAAGCAGCCCAGTAGTAGGTTGAGGCCGTTGAGCACCGC
CGCCGCAAGGAATGGTGCATGCAAGGAGATGGCGCCCAACAGTCCCCCGGCCACGGGGCCTG
CCACCATACCCACGCCGAAACAAGCGCTCATGAGCCCGAAGTGGCGAGCCCGATCTTCCCCAT
CGGTGATGTCGGCGATATAGGCGCCAGCAACCGCACCTGTGGCGCCGGTGATGCCGGCCACGA
TGCGTCCGGCGTAGAGGATCGAGATCTCGATCCCGCGAAATTAATACGACTCACTATAGGGGA
ATTGTGAGCGGATAACAATTCCCCTCTAGAAATAATTTTGTTTAACTTTAAGAAGGAGATATAC
CATGGGCAGCAGCCATCATCATCATCATCACAGCAGCGGCCTGGTGCCGCGCGGCAGCCATAT
GGCTAGTATGGATCTGGATGCAGTAAGGATTAAAGTGGACACAGTAAATGCAAAACCGGGAG
ACACAGTAAATATACCTGTAAGATTCAGTGGTATACCATCCAAGGGAATAGCAAACTGTGACT
TTGTATACAGCTATGACCCGAATGTACTTGAGATAATAGAGATAAAACCGGGAGAATTGATAG
TTGACCCGAATCCTACCAAGAGCTTTGATACTGCAGTATATCCTGACAGAAAGATGATAGTAT
TCCTGTTTGCGGAAGACAGCGGAACAGGAGCGTATGCAATAACTAAAGACGGAGTATTTGCTA
CGATAGTAGCGAAAGTAAAAGAAGGAGCACCTAACGGGCTCAGTGTAATCAAATTTGTAGAA
GTAGGCGGATTTGCGAACAATGACCTTGTAGAACAGAAGACACAGTTCTTTGACGGTGGAGTA
AATGTTGGAGATACAACAGAACCTGCAACACCTACAACACCTGTAACAACACCGACAACAAC
AGATGATCTAGATGCAGCTAGCGTGGTGGATTTCGGGGCGTTACCACCGGAGATCAACTC
CGCGAGGATGTACGCCGGCCCGGGTTCGGCCTCGCTGGTGGCCGCCGCGAAGATGTGG
GACAGCGTGGCGAGTGACCTGTTTTCGGCCGCGTCGGCGTTTCAGTCGGTGGTCTGGGG
TCTGACGGTGGGGTCGTGGATAGGTTCGTCGGCGGGTCTGATGGCGGCGGCGGCCTCGC
CGTATGTGGCGTGGATGAGCGTCACCGCGGGGCAGGCCCAGCTGACCGCCGCCCAGGTC
CGGGTTGCTGCGGCGGCCTACGAGACAGCGTATAGGCTGACGGTGCCCCCGCCGGTGAT
CGCCGAGAACCGTACCGAACTGATGACGCTGACCGCGACCAACCTCTTGGGGCAAAACA
CGCCGGCGATCGAGGCCAATCAGGCCGCATACAGCCAGATGTGGGGCCAAGACGCGGA
GGCGATGTATGGCTACGCCGCCACGGCGGCGACGGCGACCGAGGCGTTGCTGCCGTTCG
AGGACGCCCCACTGATCACCAACCCCGGCGGGCTCCTTGAGCAGGCCGTCGCGGTCGAG
GAGGCCATCGACACCGCCGCGGCGAACCAGTTGATGAACAATGTGCCCCAAGCGCTGCA
ACAGCTGGCCCAGCCAGCGCAGGGCGTCGTACCTTCTTCCAAGCTGGGTGGGCTGTGGA
CGGCGGTCTCGCCGCATCTGTCGCCGCTCAGCAACGTCAGTTCGATAGCCAACAACCAC
ATGTCGATGATGGGCACGGGTGTGTCGATGACCAACACCTTGCACTCGATGTTGAAGGG
CTTAGCTCCGGCGGCGGCTCAGGCCGTGGAAACCGCGGCGGAAAACGGGGTCTGGGCG
ATGAGCTCGCTGGGCAGCCAGCTGGGTTCGTCGCTGGGTTCTTCGGGTCTGGGCGCTGG
GGTGGCCGCCAACTTGGGTCGGGCGGCCTCGGTCGGTTCGTTGTCGGTGCCGCCAGCAT
GGGCCGCGGCCAACCAGGCGGTCACCCCGGCGGCGCGGGCGCTGCCGCTGACCAGCCT
GACCAGCGCCGCCCAAACCGCCCCCGGACACATGCTGGGCGGGCTACCGCTGGGGCACT
CGGTCAACGCCGGCAGCGGTATCAACAATGCGCTGCGGGTGCCGGCACGGGCCTACGCG
ATACCCCGCACACCGGCCGCCGGATAGGCGGCCGCACTCGAGCACCACCACCACCACCACT
GAGATCCGGCTGCTAACAAAGCCCGAAAGGAAGCTGAGTTGGCTGCTGCCACCGCTGAGCAAT
AACTAGCATAACCCCTTGGGGCCTCTAAACGGGTCTTGAGGGGTTTTTTGCTGAAAGGAGGAA
CTATATCCGGAT
Protein sequence - Rv3478 - C1308 Ecoli-pET28[6xHis-Cohesin (underlined)-
m.tbRv3478 (bold)];
(SEQ ID NO: 193)
MGSSHHHHHHSSGLVPRGSHMASMDLDAVRIKVDTVNAKPGDTVNIPVRFSGIPSKGIANCDFVYS
YDPNVLEIIEIKPGELIVDPNPTKSFDTAVYPDRKMIVFLFAEDSGTGAYAITKDGVFATIVAKVKEG
APNGLSVIKFVEVGGFANNDLVEQKTQFFDGGVNVGDTTEPATPTTPVTTPTTTDDLDAASVVDF
GALPPEINSARMYAGPGSASLVAAAKMWDSVASDLFSAASAFQSVVWGLTVGSWIGSSAGLM
AAAASPYVAWMSVTAGQAQLTAAQVRVAAAAYETAYRLTVPPPVIAENRTELMTLTATNLL
GQNTPAIEANQAAYSQMWGQDAEAMYGYAATAATATEALLPFEDAPLITNPGGLLEQAVAV
EEAIDTAAANQLMNNVPQALQQLAQPAQGVVPSSKLGGLWTAVSPHLSPLSNVSSIANNHMS
MMGTGVSMTNTLHSMLKGLAPAAAQAVETAAENGVWAMSSLGSQLGSSLGSSGLGAGVAA
NLGRAASVGSLSVPPAWAAANQAVTPAARALPLTSLTSAAQTAPGHMLGGLPLGHSVNAGSG
INNALRVPARAYAIPRTPAAG
Rv0934- C2390 Ecoli-pET28[6xHis-CthermoCohesin (underlined)-m.tbRv0934 (bold)]
Additional modifications are in italics.
(SEQ ID NO: 194)
TGGCGAATGGGACGCGCCCTGTAGCGGCGCATTAAGCGCGGCGGGTGTGGTGGTTACGCGCAG
CGTGACCGCTACACTTGCCAGCGCCCTAGCGCCCGCTCCTTTCGCTTTCTTCCCTTCCTTTCTCG
CCACGTTCGCCGGCTTTCCCCGTCAAGCTCTAAATCGGGGGCTCCCTTTAGGGTTCCGATTTAG
TGCTTTACGGCACCTCGACCCCAAAAAACTTGATTAGGGTGATGGTTCACGTAGTGGGCCATC
GCCCTGATAGACGGTTTTTCGCCCTTTGACGTTGGAGTCCACGTTCTTTAATAGTGGACTCTTGT
TCCAAACTGGAACAACACTCAACCCTATCTCGGTCTATTCTTTTGATTTATAAGGGATTTTGCC
GATTTCGGCCTATTGGTTAAAAAATGAGCTGATTTAACAAAAATTTAACGCGAATTTTAACAA
AATATTAACGTTTACAATTTCAGGTGGCACTTTTCGGGGAAATGTGCGCGGAACCCCTATTTGT
TTATTTTTCTAAATACATTCAAATATGTATCCGCTCATGAATTAATTCTTAGAAAAACTCATCG
AGCATCAAATGAAACTGCAATTTATTCATATCAGGATTATCAATACCATATTTTTGAAAAAGCC
GTTTCTGTAATGAAGGAGAAAACTCACCGAGGCAGTTCCATAGGATGGCAAGATCCTGGTATC
GGTCTGCGATTCCGACTCGTCCAACATCAATACAACCTATTAATTTCCCCTCGTCAAAAATAAG
GTTATCAAGTGAGAAATCACCATGAGTGACGACTGAATCCGGTGAGAATGGCAAAAGTTTATG
CATTTCTTTCCAGACTTGTTCAACAGGCCAGCCATTACGCTCGTCATCAAAATCACTCGCATCA
ACCAAACCGTTATTCATTCGTGATTGCGCCTGAGCGAGACGAAATACGCGATCGCTGTTAAAA
GGACAATTACAAACAGGAATCGAATGCAACCGGCGCAGGAACACTGCCAGCGCATCAACAAT
ATTTTCACCTGAATCAGGATATTCTTCTAATACCTGGAATGCTGTTTTCCCGGGGATCGCAGTG
GTGAGTAACCATGCATCATCAGGAGTACGGATAAAATGCTTGATGGTCGGAAGAGGCATAAAT
TCCGTCAGCCAGTTTAGTCTGACCATCTCATCTGTAACATCATTGGCAACGCTACCTTTGCCAT
GTTTCAGAAACAACTCTGGCGCATCGGGCTTCCCATACAATCGATAGATTGTCGCACCTGATTG
CCCGACATTATCGCGAGCCCATTTATACCCATATAAATCAGCATCCATGTTGGAATTTAATCGC
GGCCTAGAGCAAGACGTTTCCCGTTGAATATGGCTCATAACACCCCTTGTATTACTGTTTATGT
AAGCAGACAGTTTTATTGTTCATGACCAAAATCCCTTAACGTGAGTTTTCGTTCCACTGAGCGT
CAGACCCCGTAGAAAAGATCAAAGGATCTTCTTGAGATCCTTTTTTTCTGCGCGTAATCTGCTG
CTTGCAAACAAAAAAACCACCGCTACCAGCGGTGGTTTGTTTGCCGGATCAAGAGCTACCAAC
TCTTTTTCCGAAGGTAACTGGCTTCAGCAGAGCGCAGATACCAAATACTGTCCTTCTAGTGTAG
CCGTAGTTAGGCCACCACTTCAAGAACTCTGTAGCACCGCCTACATACCTCGCTCTGCTAATCC
TGTTACCAGTGGCTGCTGCCAGTGGCGATAAGTCGTGTCTTACCGGGTTGGACTCAAGACGAT
AGTTACCGGATAAGGCGCAGCGGTCGGGCTGAACGGGGGGTTCGTGCACACAGCCCAGCTTG
GAGCGAACGACCTACACCGAACTGAGATACCTACAGCGTGAGCTATGAGAAAGCGCCACGCT
TCCCGAAGGGAGAAAGGCGGACAGGTATCCGGTAAGCGGCAGGGTCGGAACAGGAGAGCGCA
CGAGGGAGCTTCCAGGGGGAAACGCCTGGTATCTTTATAGTCCTGTCGGGTTTCGCCACCTCTG
ACTTGAGCGTCGATTTTTGTGATGCTCGTCAGGGGGGCGGAGCCTATGGAAAAACGCCAGCAA
CGCGGCCTTTTTACGGTTCCTGGCCTTTTGCTGGCCTTTTGCTCACATGTTCTTTCCTGCGTTATC
CCCTGATTCTGTGGATAACCGTATTACCGCCTTTGAGTGAGCTGATACCGCTCGCCGCAGCCGA
ACGACCGAGCGCAGCGAGTCAGTGAGCGAGGAAGCGGAAGAGCGCCTGATGCGGTATTTTCT
CCTTACGCATCTGTGCGGTATTTCACACCGCATATATGGTGCACTCTCAGTACAATCTGCTCTG
ATGCCGCATAGTTAAGCCAGTATACACTCCGCTATCGCTACGTGACTGGGTCATGGCTGCGCCC
CGACACCCGCCAACACCCGCTGACGCGCCCTGACGGGCTTGTCTGCTCCCGGCATCCGCTTAC
AGACAAGCTGTGACCGTCTCCGGGAGCTGCATGTGTCAGAGGTTTTCACCGTCATCACCGAAA
CGCGCGAGGCAGCTGCGGTAAAGCTCATCAGCGTGGTCGTGAAGCGATTCACAGATGTCTGCC
TGTTCATCCGCGTCCAGCTCGTTGAGTTTCTCCAGAAGCGTTAATGTCTGGCTTCTGATAAAGC
GGGCCATGTTAAGGGCGGTTTTTTCCTGTTTGGTCACTGATGCCTCCGTGTAAGGGGGATTTCT
GTTCATGGGGGTAATGATACCGATGAAACGAGAGAGGATGCTCACGATACGGGTTACTGATGA
TGAACATGCCCGGTTACTGGAACGTTGTGAGGGTAAACAACTGGCGGTATGGATGCGGCGGGA
CCAGAGAAAAATCACTCAGGGTCAATGCCAGCGCTTCGTTAATACAGATGTAGGTGTTCCACA
GGGTAGCCAGCAGCATCCTGCGATGCAGATCCGGAACATAATGGTGCAGGGCGCTGACTTCCG
CGTTTCCAGACTTTACGAAACACGGAAACCGAAGACCATTCATGTTGTTGCTCAGGTCGCAGA
CGTTTTGCAGCAGCAGTCGCTTCACGTTCGCTCGCGTATCGGTGATTCATTCTGCTAACCAGTA
AGGCAACCCCGCCAGCCTAGCCGGGTCCTCAACGACAGGAGCACGATCATGCGCACCCGTGG
GGCCGCCATGCCGGCGATAATGGCCTGCTTCTCGCCGAAACGTTTGGTGGCGGGACCAGTGAC
GAAGGCTTGAGCGAGGGCGTGCAAGATTCCGAATACCGCAAGCGACAGGCCGATCATCGTCG
CGCTCCAGCGAAAGCGGTCCTCGCCGAAAATGACCCAGAGCGCTGCCGGCACCTGTCCTACGA
GTTGCATGATAAAGAAGACAGTCATAAGTGCGGCGACGATAGTCATGCCCCGCGCCCACCGGA
AGGAGCTGACTGGGTTGAAGGCTCTCAAGGGCATCGGTCGAGATCCCGGTGCCTAATGAGTGA
GCTAACTTACATTAATTGCGTTGCGCTCACTGCCCGCTTTCCAGTCGGGAAACCTGTCGTGCCA
GCTGCATTAATGAATCGGCCAACGCGCGGGGAGAGGCGGTTTGCGTATTGGGCGCCAGGGTGG
TTTTTCTTTTCACCAGTGAGACGGGCAACAGCTGATTGCCCTTCACCGCCTGGCCCTGAGAGAG
TTGCAGCAAGCGGTCCACGCTGGTTTGCCCCAGCAGGCGAAAATCCTGTTTGATGGTGGTTAA
CGGCGGGATATAACATGAGCTGTCTTCGGTATCGTCGTATCCCACTACCGAGATATCCGCACC
AACGCGCAGCCCGGACTCGGTAATGGCGCGCATTGCGCCCAGCGCCATCTGATCGTTGGCAAC
CAGCATCGCAGTGGGAACGATGCCCTCATTCAGCATTTGCATGGTTTGTTGAAAACCGGACAT
GGCACTCCAGTCGCCTTCCCGTTCCGCTATCGGCTGAATTTGATTGCGAGTGAGATATTTATGC
CAGCCAGCCAGACGCAGACGCGCCGAGACAGAACTTAATGGGCCCGCTAACAGCGCGATTTG
CTGGTGACCCAATGCGACCAGATGCTCCACGCCCAGTCGCGTACCGTCTTCATGGGAGAAAAT
AATACTGTTGATGGGTGTCTGGTCAGAGACATCAAGAAATAACGCCGGAACATTAGTGCAGGC
AGCTTCCACAGCAATGGCATCCTGGTCATCCAGCGGATAGTTAATGATCAGCCCACTGACGCG
TTGCGCGAGAAGATTGTGCACCGCCGCTTTACAGGCTTCGACGCCGCTTCGTTCTACCATCGAC
ACCACCACGCTGGCACCCAGTTGATCGGCGCGAGATTTAATCGCCGCGACAATTTGCGACGGC
GCGTGCAGGGCCAGACTGGAGGTGGCAACGCCAATCAGCAACGACTGTTTGCCCGCCAGTTGT
TGTGCCACGCGGTTGGGAATGTAATTCAGCTCCGCCATCGCCGCTTCCACTTTTTCCCGCGTTTT
CGCAGAAACGTGGCTGGCCTGGTTCACCACGCGGGAAACGGTCTGATAAGAGACACCGGCAT
ACTCTGCGACATCGTATAACGTTACTGGTTTCACATTCACCACCCTGAATTGACTCTCTTCCGG
GCGCTATCATGCCATACCGCGAAAGGTTTTGCGCCATTCGATGGTGTCCGGGATCTCGACGCTC
TCCCTTATGCGACTCCTGCATTAGGAAGCAGCCCAGTAGTAGGTTGAGGCCGTTGAGCACCGC
CGCCGCAAGGAATGGTGCATGCAAGGAGATGGCGCCCAACAGTCCCCCGGCCACGGGGCCTG
CCACCATACCCACGCCGAAACAAGCGCTCATGAGCCCGAAGTGGCGAGCCCGATCTTCCCCAT
CGGTGATGTCGGCGATATAGGCGCCAGCAACCGCACCTGTGGCGCCGGTGATGCCGGCCACGA
TGCGTCCGGCGTAGAGGATCGAGATCTCGATCCCGCGAAATTAATACGACTCACTATAGGGGA
ATTGTGAGCGGATAACAATTCCCCTCTAGAAATAATTTTGTTTAACTTTAAGAAGGAGATATAC
CATGGGCAGCAGCCATCATCATCATCATCACAGCAGCGGCCTGGTGCCGCGCGGCAGCCATAT
GGCTAGTATGGATCTGGATGCAGTAAGGATTAAAGTGGACACAGTAAATGCAAAACCGGGAG
ACACAGTAAATATACCTGTAAGATTCAGTGGTATACCATCCAAGGGAATAGCAAACTGTGACT
TTGTATACAGCTATGACCCGAATGTACTTGAGATAATAGAGATAAAACCGGGAGAATTGATAG
TTGACCCGAATCCTACCAAGAGCTTTGATACTGCAGTATATCCTGACAGAAAGATGATAGTAT
TCCTGTTTGCGGAAGACAGCGGAACAGGAGCGTATGCAATAACTAAAGACGGAGTATTTGCTA
CGATAGTAGCGAAAGTAAAAGAAGGAGCACCTAACGGGCTCAGTGTAATCAAATTTGTAGAA
GTAGGCGGATTTGCGAACAATGACCTTGTAGAACAGAAGACACAGTTCTTTGACGGTGGAGTA
AATGTTGGAGATACAACAGAACCTGCAACACCTACAACACCTGTAACAACACCGACAACAAC
AGATGATCTAGATGCAGCTAGCGTGAAAATTCGTTTGCATACGCTGTTGGCCGTGTTGACC
GCTGCGCCGCTGCTGCTAGCAGCGGCGGGCTGTGGCTCGAAACCACCGAGCGGTTCGCC
TGAAACGGGCGCCGGCGCCGGTACTGTCGCGACTACCCCCGCGTCGTCGCCGGTGACGT
TGGCGGAGACCGGTAGCACGCTGCTCTACCCGCTGTTCAACCTGTGGGGTCCGGCCTTT
CACGAGAGGTATCCGAACGTCACGATCACCGCTCAGGGCACCGGTTCTGGTGCCGGGAT
CGCGCAGGCCGCCGCCGGGACGGTCAACATTGGGGCCTCCGACGCCTATCTGTCGGAAG
GTGATATGGCCGCGCACAAGGGGCTGATGAACATCGCGCTAGCCATCTCCGCTCAGCAG
GTCAACTACAACCTGCCCGGAGTGAGCGAGCACCTCAAGCTGAACGGAAAAGTCCTGGC
GGCCATGTACCAGGGCACCATCAAAACCTGGGACGACCCGCAGATCGCTGCGCTCAACC
CCGGCGTGAACCTGCCCGGCACCGCGGTAGTTCCGCTGCACCGCTCCGACGGGTCCGGT
GACACCTTCTTGTTCACCCAGTACCTGTCCAAGCAAGATCCCGAGGGCTGGGGCAAGTC
GCCCGGCTTCGGCACCACCGTCGACTTCCCGGCGGTGCCGGGTGCGCTGGGTGAGAACG
GCAACGGCGGCATGGTGACGGTTGCGCCGAGACACCGGGCTGCGTGGCCTATATCGGCA
TCAGCTTCCTCGACCAGGCCAGTCAACGGGGACTCGGCGAGGCCCAACTAGGCAATAGC
TCTGGCAATTTCTTGTTGCCCGACGCGCAAAGCATTCAGGCCGCGGCGGCTGGCTTCGC
ATCGAAAACCCCGGCGAACCAGGCGATTTCGATGATCGACGGGCCCGCCCCGGACGGCT
ACCCGATCATCAACTACGAGTACGCCATCGTCAACAACCGGCAAAAGGACGCCGCCACC
GCGCAGACCTTGCAGGCATTTCTGCACTGGGCGATCACCGACGGCAACAAGGCCTCGTT
CCTCGACCAGGTTCATTTCCAGCCGCTGCCGCCCGCGGTGGTGAAGTTGTCTGACGCGT
TGATCGCGACGATTTCCAGCTAG [symbol] CGGCCGCACTCGAGCACCACCACCACCACCACTGAGAT
CCGGCTGCTAACAAAGCCCGAAAGGAAGCTGAGTTGGCTGCTGCCACCGCTGAGCAATAACTA
GCATAACCCCTTGGGGCCTCTAAACGGGTCTTGAGGGGTTTTTTGCTGAAAGGAGGAACTATA
TCCGGAT
Protein sequence - Rv0934- C2390 Ecoli-pET28[6xHis-CthermoCohesin (underlined)-
m.tbRv0934 (bold)];
(SEQ ID NO: 195)
MGSSHHHHHHSSGLVPRGSHMASMDLDAVRIKVDTVNAKPGDTVNIPVRFSGIPSKGIANCDFVYS
YDPNVLEIIEIKPGELIVDPNPTKSFDTAVYPDRKMIVFLFAEDSGTGAYAITKDGVFATIVAKVKEG
APNGLSVIKFVEVGGFANNDLVEQKTQFFDGGVNVGDTTEPATPTTPVTTPTTTDDLDAASGCGS
KPPSGSPETGAGAGTVATTPASSPVTLAETGSTLLYPLFNLWGPAFHERYPNVTITAQGTGSG
AGIAQAAAGTVNIGASDAYLSEGDMAAHKGLMNIALAISAQQVNYNLPGVSEHLKLNGKVLA
AMYQGTIKTWDDPQIAALNPGVNLPGTAVVPLHRSDGSGDTFLFTQYLSKQDPEGWGKSPG
FGTTVDFPAVPGALGENGNGGMVTGCAETPGCVAYIGISFLDQASQRGLGEAQLGNSSGNFL
LPDAQSIQAAAAGFASKTPANQAISMIDGPAPDGYPIINYEYAIVNNRQKDAATAQTLQAFLH
WAITDGNKASFLDQVHFQPLPPAVVKLSDALIATISSEF
Rv2608 - C1259 Ecoli-pET28[6xHis-Cohesin (underlined)-m.tbRv2608 (bold)]
(SEQ ID NO: 196)
TGGCGAATGGGACGCGCCCTGTAGCGGCGCATTAAGCGCGGCGGGTGTGGTGGTTACGCGCAG
CGTGACCGCTACACTTGCCAGCGCCCTAGCGCCCGCTCCTTTCGCTTTCTTCCCTTCCTTTCTCG
CCACGTTCGCCGGCTTTCCCCGTCAAGCTCTAAATCGGGGGCTCCCTTTAGGGTTCCGATTTAG
TGCTTTACGGCACCTCGACCCCAAAAAACTTGATTAGGGTGATGGTTCACGTAGTGGGCCATC
GCCCTGATAGACGGTTTTTCGCCCTTTGACGTTGGAGTCCACGTTCTTTAATAGTGGACTCTTGT
TCCAAACTGGAACAACACTCAACCCTATCTCGGTCTATTCTTTTGATTTATAAGGGATTTTGCC
GATTTCGGCCTATTGGTTAAAAAATGAGCTGATTTAACAAAAATTTAACGCGAATTTTAACAA
AATATTAACGTTTACAATTTCAGGTGGCACTTTTCGGGGAAATGTGCGCGGAACCCCTATTTGT
TTATTTTTCTAAATACATTCAAATATGTATCCGCTCATGAATTAATTCTTAGAAAAACTCATCG
AGCATCAAATGAAACTGCAATTTATTCATATCAGGATTATCAATACCATATTTTTGAAAAAGCC
GTTTCTGTAATGAAGGAGAAAACTCACCGAGGCAGTTCCATAGGATGGCAAGATCCTGGTATC
GGTCTGCGATTCCGACTCGTCCAACATCAATACAACCTATTAATTTCCCCTCGTCAAAAATAAG
GTTATCAAGTGAGAAATCACCATGAGTGACGACTGAATCCGGTGAGAATGGCAAAAGTTTATG
CATTTCTTTCCAGACTTGTTCAACAGGCCAGCCATTACGCTCGTCATCAAAATCACTCGCATCA
ACCAAACCGTTATTCATTCGTGATTGCGCCTGAGCGAGACGAAATACGCGATCGCTGTTAAAA
GGACAATTACAAACAGGAATCGAATGCAACCGGCGCAGGAACACTGCCAGCGCATCAACAAT
ATTTTCACCTGAATCAGGATATTCTTCTAATACCTGGAATGCTGTTTTCCCGGGGATCGCAGTG
GTGAGTAACCATGCATCATCAGGAGTACGGATAAAATGCTTGATGGTCGGAAGAGGCATAAAT
TCCGTCAGCCAGTTTAGTCTGACCATCTCATCTGTAACATCATTGGCAACGCTACCTTTGCCAT
GTTTCAGAAACAACTCTGGCGCATCGGGCTTCCCATACAATCGATAGATTGTCGCACCTGATTG
CCCGACATTATCGCGAGCCCATTTATACCCATATAAATCAGCATCCATGTTGGAATTTAATCGC
GGCCTAGAGCAAGACGTTTCCCGTTGAATATGGCTCATAACACCCCTTGTATTACTGTTTATGT
AAGCAGACAGTTTTATTGTTCATGACCAAAATCCCTTAACGTGAGTTTTCGTTCCACTGAGCGT
CAGACCCCGTAGAAAAGATCAAAGGATCTTCTTGAGATCCTTTTTTTCTGCGCGTAATCTGCTG
CTTGCAAACAAAAAAACCACCGCTACCAGCGGTGGTTTGTTTGCCGGATCAAGAGCTACCAAC
TCTTTTTCCGAAGGTAACTGGCTTCAGCAGAGCGCAGATACCAAATACTGTCCTTCTAGTGTAG
CCGTAGTTAGGCCACCACTTCAAGAACTCTGTAGCACCGCCTACATACCTCGCTCTGCTAATCC
TGTTACCAGTGGCTGCTGCCAGTGGCGATAAGTCGTGTCTTACCGGGTTGGACTCAAGACGAT
AGTTACCGGATAAGGCGCAGCGGTCGGGCTGAACGGGGGGTTCGTGCACACAGCCCAGCTTG
GAGCGAACGACCTACACCGAACTGAGATACCTACAGCGTGAGCTATGAGAAAGCGCCACGCT
TCCCGAAGGGAGAAAGGCGGACAGGTATCCGGTAAGCGGCAGGGTCGGAACAGGAGAGCGC
ACGAGGGAGCTTCCAGGGGGAAACGCCTGGTATCTTTATAGTCCTGTCGGGTTTCGCCACCTCT
GACTTGAGCGTCGATTTTTGTGATGCTCGTCAGGGGGGCGGAGCCTATGGAAAAACGCCAGCA
ACGCGGCCTTTTTACGGTTCCTGGCCTTTTGCTGGCCTTTTGCTCACATGTTCTTTCCTGCGTTA
TCCCCTGATTCTGTGGATAACCGTATTACCGCCTTTGAGTGAGCTGATACCGCTCGCCGCAGCC
GAACGACCGAGCGCAGCGAGTCAGTGAGCGAGGAAGCGGAAGAGCGCCTGATGCGGTATTTT
CTCCTTACGCATCTGTGCGGTATTTCACACCGCATATATGGTGCACTCTCAGTACAATCTGCTC
TGATGCCGCATAGTTAAGCCAGTATACACTCCGCTATCGCTACGTGACTGGGTCATGGCTGCGC
CCCGACACCCGCCAACACCCGCTGACGCGCCCTGACGGGCTTGTCTGCTCCCGGCATCCGCTTA
CAGACAAGCTGTGACCGTCTCCGGGAGCTGCATGTGTCAGAGGTTTTCACCGTCATCACCGAA
ACGCGCGAGGCAGCTGCGGTAAAGCTCATCAGCGTGGTCGTGAAGCGATTCACAGATGTCTGC
CTGTTCATCCGCGTCCAGCTCGTTGAGTTTCTCCAGAAGCGTTAATGTCTGGCTTCTGATAAAG
CGGGCCATGTTAAGGGCGGTTTTTTCCTGTTTGGTCACTGATGCCTCCGTGTAAGGGGGATTTC
TGTTCATGGGGGTAATGATACCGATGAAACGAGAGAGGATGCTCACGATACGGGTTACTGATG
ATGAACATGCCCGGTTACTGGAACGTTGTGAGGGTAAACAACTGGCGGTATGGATGCGGCGGG
ACCAGAGAAAAATCACTCAGGGTCAATGCCAGCGCTTCGTTAATACAGATGTAGGTGTTCCAC
AGGGTAGCCAGCAGCATCCTGCGATGCAGATCCGGAACATAATGGTGCAGGGCGCTGACTTCC
GCGTTTCCAGACTTTACGAAACACGGAAACCGAAGACCATTCATGTTGTTGCTCAGGTCGCAG
ACGTTTTGCAGCAGCAGTCGCTTCACGTTCGCTCGCGTATCGGTGATTCATTCTGCTAACCAGT
AAGGCAACCCCGCCAGCCTAGCCGGGTCCTCAACGACAGGAGCACGATCATGCGCACCCGTG
GGGCCGCCATGCCGGCGATAATGGCCTGCTTCTCGCCGAAACGTTTGGTGGCGGGACCAGTGA
CGAAGGCTTGAGCGAGGGCGTGCAAGATTCCGAATACCGCAAGCGACAGGCCGATCATCGTC
GCGCTCCAGCGAAAGCGGTCCTCGCCGAAAATGACCCAGAGCGCTGCCGGCACCTGTCCTACG
AGTTGCATGATAAAGAAGACAGTCATAAGTGCGGCGACGATAGTCATGCCCCGCGCCCACCGG
AAGGAGCTGACTGGGTTGAAGGCTCTCAAGGGCATCGGTCGAGATCCCGGTGCCTAATGAGTG
AGCTAACTTACATTAATTGCGTTGCGCTCACTGCCCGCTTTCCAGTCGGGAAACCTGTCGTGCC
AGCTGCATTAATGAATCGGCCAACGCGCGGGGAGAGGCGGTTTGCGTATTGGGCGCCAGGGTG
GTTTTTCTTTTCACCAGTGAGACGGGCAACAGCTGATTGCCCTTCACCGCCTGGCCCTGAGAGA
GTTGCAGCAAGCGGTCCACGCTGGTTTGCCCCAGCAGGCGAAAATCCTGTTTGATGGTGGTTA
ACGGCGGGATATAACATGAGCTGTCTTCGGTATCGTCGTATCCCACTACCGAGATATCCGCAC
CAACGCGCAGCCCGGACTCGGTAATGGCGCGCATTGCGCCCAGCGCCATCTGATCGTTGGCAA
CCAGCATCGCAGTGGGAACGATGCCCTCATTCAGCATTTGCATGGTTTGTTGAAAACCGGACA
TGGCACTCCAGTCGCCTTCCCGTTCCGCTATCGGCTGAATTTGATTGCGAGTGAGATATTTATG
CCAGCCAGCCAGACGCAGACGCGCCGAGACAGAACTTAATGGGCCCGCTAACAGCGCGATTT
GCTGGTGACCCAATGCGACCAGATGCTCCACGCCCAGTCGCGTACCGTCTTCATGGGAGAAAA
TAATACTGTTGATGGGTGTCTGGTCAGAGACATCAAGAAATAACGCCGGAACATTAGTGCAGG
CAGCTTCCACAGCAATGGCATCCTGGTCATCCAGCGGATAGTTAATGATCAGCCCACTGACGC
GTTGCGCGAGAAGATTGTGCACCGCCGCTTTACAGGCTTCGACGCCGCTTCGTTCTACCATCGA
CACCACCACGCTGGCACCCAGTTGATCGGCGCGAGATTTAATCGCCGCGACAATTTGCGACGG
CGCGTGCAGGGCCAGACTGGAGGTGGCAACGCCAATCAGCAACGACTGTTTGCCCGCCAGTTG
TTGTGCCACGCGGTTGGGAATGTAATTCAGCTCCGCCATCGCCGCTTCCACTTTTTCCCGCGTTT
TCGCAGAAACGTGGCTGGCCTGGTTCACCACGCGGGAAACGGTCTGATAAGAGACACCGGCAT
ACTCTGCGACATCGTATAACGTTACTGGTTTCACATTCACCACCCTGAATTGACTCTCTTCCGG
GCGCTATCATGCCATACCGCGAAAGGTTTTGCGCCATTCGATGGTGTCCGGGATCTCGACGCTC
TCCCTTATGCGACTCCTGCATTAGGAAGCAGCCCAGTAGTAGGTTGAGGCCGTTGAGCACCGC
CGCCGCAAGGAATGGTGCATGCAAGGAGATGGCGCCCAACAGTCCCCCGGCCACGGGGCCTG
CCACCATACCCACGCCGAAACAAGCGCTCATGAGCCCGAAGTGGCGAGCCCGATCTTCCCCAT
CGGTGATGTCGGCGATATAGGCGCCAGCAACCGCACCTGTGGCGCCGGTGATGCCGGCCACGA
TGCGTCCGGCGTAGAGGATCGAGATCTCGATCCCGCGAAATTAATACGACTCACTATAGGGGA
ATTGTGAGCGGATAACAATTCCCCTCTAGAAATAATTTTGTTTAACTTTAAGAAGGAGATATAC
CATGGGCAGCAGCCATCATCATCATCATCACAGCAGCGGCCTGGTGCCGCGCGGCAGCCATAT
GGCTAGTATGGATCTGGATGCAGTAAGGATTAAAGTGGACACAGTAAATGCAAAACCGGGAG
ACACAGTAAATATACCTGTAAGATTCAGTGGTATACCATCCAAGGGAATAGCAAACTGTGACT
TTGTATACAGCTATGACCCGAATGTACTTGAGATAATAGAGATAAAACCGGGAGAATTGATAG
TTGACCCGAATCCTACCAAGAGCTTTGATACTGCAGTATATCCTGACAGAAAGATGATAGTAT
TCCTGTTTGCGGAAGACAGCGGAACAGGAGCGTATGCAATAACTAAAGACGGAGTATTTGCTA
CGATAGTAGCGAAAGTAAAAGAAGGAGCACCTAACGGGCTCAGTGTAATCAAATTTGTAGAA
GTAGGCGGATTTGCGAACAATGACCTTGTAGAACAGAAGACACAGTTCTTTGACGGTGGAGTA
AATGTTGGAGATACAACAGAACCTGCAACACCTACAACACCTGTAACAACACCGACAACAAC
AGATGATCTAGATGCAGCTAGTATGAATTTCGCCGTTTTGCCGCCGGAGGTGAATTCGGCGCG
CATATTCGCCGGTGCGGGCCTGGGCCCAATGCTGGCGGCGGCGTCGGCCTGGGACGGGTTGGC
CGAGGAGTTGCATGCCGCGGCGGGCTCGTTCGCGTCGGTGACCACCGGGTTGGCGGGCGACGC
GTGGCATGGTCCGGCGTCGCTGGCGATGACCCGCGCGGCCAGCCCGTATGTGGGGTGGT
TGAACACGGCGGCGGGTCAGGCCGCGCAGGCGGCCGGCCAGGCGCGGCTAGCGGCGAG
CGCGTTCGAGGCGACGCTGGCGGCCACCGTGTCTCCAGCGATGGTCGCGGCCAACCGGA
CACGGCTGGCGTCGCTGGTGGCAGCCAACTTGCTGGGCCAGAACGCCCCGGCGATCGCG
GCCGCGGAGGCTGAATACGAGCAGATATGGGCCCAGGACGTGGCCGCGATGTTCGGCTA
TCACTCCGCCGCGTCGGCGGTGGCCACGCAGCTGGCGCCTATTCAAGAGGGTTTGCAGC
AGCAGCTGCAAAACGTGCTGGCCCAGTTGGCTAGCGGGAACCTGGGCAGCGGAAATGTG
GGCGTCGGCAACATCGGCAACGACAACATTGGCAACGCAAACATCGGCTTCGGAAATCG
AGGCGACGCCAACATCGGCATCGGGAATATCGGCGACAGAAACCTCGGCATTGGGAACA
CCGGCAATTGGAATATCGGCATCGGCATCACCGGCAACGGACAAATCGGCTTCGGCAAG
CCTGCCAACCCCGACGTCTTGGTGGTGGGCAACGGCGGCCCGGGAGTAACCGCGTTGGT
CATGGGCGGCACCGACAGCCTACTGCCGCTGCCCAACATCCCCTTACTCGAGTACGCTG
CGCGGTTCATCACCCCCGTGCATCCCGGATACACCGCTACGTTCCTGGAAACGCCATCGC
AGTTTTTCCCATTCACCGGGCTGAATAGCCTGACCTATGACGTCTCCGTGGCCCAGGGCG
TAACGAATCTGCACACCGCGATCATGGCGCAACTCGCGGCGGGAAACGAAGTCGTCGTC
TTCGGCACCTCCCAAAGCGCCACGATAGCCACCTTCGAAATGCGCTATCTGCAATCCCTG
CCAGCACACCTGCGTCCGGGTCTCGACGAATTGTCCTTTACGTTGACCGGCAATCCCAAC
CGGCCCGACGGTGGCATTCTTACGCGTTTTGGCTTCTCCATACCGCAGTTGGGTTTCACA
TTGTCCGGCGCGACGCCCGCCGACGCCTACCCCACCGTCGATTACGCGTTCCAGTACGA
CGGCGTCAACGACTTCCCCAAATACCCGCTGAATGTCTTCGCGACCGCCAACGCGATCG
CGGGCATCCTTTTCCTGCACTCCGGGTTGATTGCGTTGCCGCCCGATCTTGCCTCGGGCG
TGGTTCAACCGGTGTCCTCACCGGACGTCCTGACCACCTACATCCTGCTGCCCAGCCAAG
ATCTGCCGCTGCTGGTCCCGCTGCGTGCTATCCCCCTGCTGGGAAACCCGCTTGCCGAC
CTCATCCAGCCGGACTTGCGGGTGCTCGTCGAGTTGGGTTATGACCGCACCGCCCACCA
GGACGTGCCCAGCCCGTTCGGACTGTTTCCGGACGTCGATTGGGCCGAGGTGGCCGCGG
ACCTGCAGCAAGGCGCCGTGCAAGGCGTCAACGACGCCCTGTCCGGACTGGGGCTGCCG
CCGCCGTGGCAGCCGGCGCTACCCCGACTTTTCTAAAAGCTTGCGGCCGCACTCGAGCA
CCACCACCACCACCACTGAGATCCGGCTGCTAACAAAGCCCGAAAGGAAGCTGAGTTGGCTG
CTGCCACCGCTGAGCAATAACTAGCATAACCCCTTGGGGCCTCTAAACGGGTCTTGAGGGGTT
TTTTGCTGAAAGGAGGAACTATATCCGGAT
Protein sequence Rv2608 - C1259 Ecoli-pET28[6xHis-Cohesin (underlined)-m.tbRv2608
(bold)]
(SEQ ID NO: 197)
MGSSHHHHHHSSGLVPRGSHMASMDLDAVRIKVDTVNAKPGDTVNIPVRFSGIPSKGIANCDFVYS
YDPNVLEIIEIKPGELIVDPNPTKSFDTAVYPDRKMIVFLFAEDSGTGAYAITKDGVFATIVAKVKEG
APNGLSVIKFVEVGGFANNDLVEQKTQFFDGGVNVGDTTEPATPTTPVTTPTTTDDLDAASMNFA
VLPPEVNSARIFAGAGLGPMLAAASAWDGLAEELHAAAGSFASVTTGLAGDAWHGPASLAM
TRAASPYVGWLNTAAGQAAQAAGQARLAASAFEATLAATVSPAMVAANRTRLASLVAANLL
GQNAPAIAAAEAEYEQIWAQDVAAMFGYHSAASAVATQLAPIQEGLQQQLQNVLAQLASGN
LGSGNVGVGNIGNDNIGNANIGFGNRGDANIGIGNIGDRNLGIGNTGNWNIGIGITGNGQIGFG
KPANPDVLVVGNGGPGVTALVMGGTDSLLPLPNIPLLEYAARFITPVHPGYTATFLETPSQFF
PFTGLNSLTYDVSVAQGVTNLHTAIMAQLAAGNEVVVFGTSQSATIATFEMRYLQSLPAHLRP
GLDELSFTLTGNPNRPDGGILTRFGFSIPQLGFTLSGATPADAYPTVDYAFQYDGVNDFPKYPL
NVFATANAIAGILFLHSGLIALPPDLASGVVQPVSSPDVLTTYILLPSQDLPLLVPLRAIPLLGNP
LADLIQPDLRVLVELGYDRTAHQDVPSPFGLFPDVDWAEVAADLQQGAVQGVNDALSGLGL
PPPWQPALPRLF
Rv3864 - C2363 Ecoli-pET28[6xHis-CthermoCohesin (underlined)-m.tbRv3864 (bold)];
Additional modifications are in italics.
(SEQ ID NO: 198)
TGGCGAATGGGACGCGCCCTGTAGCGGCGCATTAAGCGCGGCGGGTGTGGTGGTTACGCGCAG
CGTGACCGCTACACTTGCCAGCGCCCTAGCGCCCGCTCCTTTCGCTTTCTTCCCTTCCTTTCTCG
CCACGTTCGCCGGCTTTCCCCGTCAAGCTCTAAATCGGGGGCTCCCTTTAGGGTTCCGATTTAG
TGCTTTACGGCACCTCGACCCCAAAAAACTTGATTAGGGTGATGGTTCACGTAGTGGGCCATC
GCCCTGATAGACGGTTTTTCGCCCTTTGACGTTGGAGTCCACGTTCTTTAATAGTGGACTCTTGT
TCCAAACTGGAACAACACTCAACCCTATCTCGGTCTATTCTTTTGATTTATAAGGGATTTTGCC
GATTTCGGCCTATTGGTTAAAAAATGAGCTGATTTAACAAAAATTTAACGCGAATTTTAACAA
AATATTAACGTTTACAATTTCAGGTGGCACTTTTCGGGGAAATGTGCGCGGAACCCCTATTTGT
TTATTTTTCTAAATACATTCAAATATGTATCCGCTCATGAATTAATTCTTAGAAAAACTCATCG
AGCATCAAATGAAACTGCAATTTATTCATATCAGGATTATCAATACCATATTTTTGAAAAAGCC
GTTTCTGTAATGAAGGAGAAAACTCACCGAGGCAGTTCCATAGGATGGCAAGATCCTGGTATC
GGTCTGCGATTCCGACTCGTCCAACATCAATACAACCTATTAATTTCCCCTCGTCAAAAATAAG
GTTATCAAGTGAGAAATCACCATGAGTGACGACTGAATCCGGTGAGAATGGCAAAAGTTTATG
CATTTCTTTCCAGACTTGTTCAACAGGCCAGCCATTACGCTCGTCATCAAAATCACTCGCATCA
ACCAAACCGTTATTCATTCGTGATTGCGCCTGAGCGAGACGAAATACGCGATCGCTGTTAAAA
GGACAATTACAAACAGGAATCGAATGCAACCGGCGCAGGAACACTGCCAGCGCATCAACAAT
ATTTTCACCTGAATCAGGATATTCTTCTAATACCTGGAATGCTGTTTTCCCGGGGATCGCAGTG
GTGAGTAACCATGCATCATCAGGAGTACGGATAAAATGCTTGATGGTCGGAAGAGGCATAAAT
TCCGTCAGCCAGTTTAGTCTGACCATCTCATCTGTAACATCATTGGCAACGCTACCTTTGCCAT
GTTTCAGAAACAACTCTGGCGCATCGGGCTTCCCATACAATCGATAGATTGTCGCACCTGATTG
CCCGACATTATCGCGAGCCCATTTATACCCATATAAATCAGCATCCATGTTGGAATTTAATCGC
GGCCTAGAGCAAGACGTTTCCCGTTGAATATGGCTCATAACACCCCTTGTATTACTGTTTATGT
AAGCAGACAGTTTTATTGTTCATGACCAAAATCCCTTAACGTGAGTTTTCGTTCCACTGAGCGT
CAGACCCCGTAGAAAAGATCAAAGGATCTTCTTGAGATCCTTTTTTTCTGCGCGTAATCTGCTG
CTTGCAAACAAAAAAACCACCGCTACCAGCGGTGGTTTGTTTGCCGGATCAAGAGCTACCAAC
TCTTTTTCCGAAGGTAACTGGCTTCAGCAGAGCGCAGATACCAAATACTGTCCTTCTAGTGTAG
CCGTAGTTAGGCCACCACTTCAAGAACTCTGTAGCACCGCCTACATACCTCGCTCTGCTAATCC
TGTTACCAGTGGCTGCTGCCAGTGGCGATAAGTCGTGTCTTACCGGGTTGGACTCAAGACGAT
AGTTACCGGATAAGGCGCAGCGGTCGGGCTGAACGGGGGGTTCGTGCACACAGCCCAGCTTG
GAGCGAACGACCTACACCGAACTGAGATACCTACAGCGTGAGCTATGAGAAAGCGCCACGCT
TCCCGAAGGGAGAAAGGCGGACAGGTATCCGGTAAGCGGCAGGGTCGGAACAGGAGAGCGC
ACGAGGGAGCTTCCAGGGGGAAACGCCTGGTATCTTTATAGTCCTGTCGGGTTTCGCCACCTCT
GACTTGAGCGTCGATTTTTGTGATGCTCGTCAGGGGGGCGGAGCCTATGGAAAAACGCCAGCA
ACGCGGCCTTTTTACGGTTCCTGGCCTTTTGCTGGCCTTTTGCTCACATGTTCTTTCCTGCGTTA
TCCCCTGATTCTGTGGATAACCGTATTACCGCCTTTGAGTGAGCTGATACCGCTCGCCGCAGCC
GAACGACCGAGCGCAGCGAGTCAGTGAGCGAGGAAGCGGAAGAGCGCCTGATGCGGTATTTT
CTCCTTACGCATCTGTGCGGTATTTCACACCGCATATATGGTGCACTCTCAGTACAATCTGCTC
TGATGCCGCATAGTTAAGCCAGTATACACTCCGCTATCGCTACGTGACTGGGTCATGGCTGCGC
CCCGACACCCGCCAACACCCGCTGACGCGCCCTGACGGGCTTGTCTGCTCCCGGCATCCGCTTA
CAGACAAGCTGTGACCGTCTCCGGGAGCTGCATGTGTCAGAGGTTTTCACCGTCATCACCGAA
ACGCGCGAGGCAGCTGCGGTAAAGCTCATCAGCGTGGTCGTGAAGCGATTCACAGATGTCTGC
CTGTTCATCCGCGTCCAGCTCGTTGAGTTTCTCCAGAAGCGTTAATGTCTGGCTTCTGATAAAG
CGGGCCATGTTAAGGGCGGTTTTTTCCTGTTTGGTCACTGATGCCTCCGTGTAAGGGGGATTTC
TGTTCATGGGGGTAATGATACCGATGAAACGAGAGAGGATGCTCACGATACGGGTTACTGATG
ATGAACATGCCCGGTTACTGGAACGTTGTGAGGGTAAACAACTGGCGGTATGGATGCGGCGGG
ACCAGAGAAAAATCACTCAGGGTCAATGCCAGCGCTTCGTTAATACAGATGTAGGTGTTCCAC
AGGGTAGCCAGCAGCATCCTGCGATGCAGATCCGGAACATAATGGTGCAGGGCGCTGACTTCC
GCGTTTCCAGACTTTACGAAACACGGAAACCGAAGACCATTCATGTTGTTGCTCAGGTCGCAG
ACGTTTTGCAGCAGCAGTCGCTTCACGTTCGCTCGCGTATCGGTGATTCATTCTGCTAACCAGT
AAGGCAACCCCGCCAGCCTAGCCGGGTCCTCAACGACAGGAGCACGATCATGCGCACCCGTG
GGGCCGCCATGCCGGCGATAATGGCCTGCTTCTCGCCGAAACGTTTGGTGGCGGGACCAGTGA
CGAAGGCTTGAGCGAGGGCGTGCAAGATTCCGAATACCGCAAGCGACAGGCCGATCATCGTC
GCGCTCCAGCGAAAGCGGTCCTCGCCGAAAATGACCCAGAGCGCTGCCGGCACCTGTCCTACG
AGTTGCATGATAAAGAAGACAGTCATAAGTGCGGCGACGATAGTCATGCCCCGCGCCCACCGG
AAGGAGCTGACTGGGTTGAAGGCTCTCAAGGGCATCGGTCGAGATCCCGGTGCCTAATGAGTG
AGCTAACTTACATTAATTGCGTTGCGCTCACTGCCCGCTTTCCAGTCGGGAAACCTGTCGTGCC
AGCTGCATTAATGAATCGGCCAACGCGCGGGGAGAGGCGGTTTGCGTATTGGGCGCCAGGGTG
GTTTTTCTTTTCACCAGTGAGACGGGCAACAGCTGATTGCCCTTCACCGCCTGGCCCTGAGAGA
GTTGCAGCAAGCGGTCCACGCTGGTTTGCCCCAGCAGGCGAAAATCCTGTTTGATGGTGGTTA
ACGGCGGGATATAACATGAGCTGTCTTCGGTATCGTCGTATCCCACTACCGAGATATCCGCAC
CAACGCGCAGCCCGGACTCGGTAATGGCGCGCATTGCGCCCAGCGCCATCTGATCGTTGGCAA
CCAGCATCGCAGTGGGAACGATGCCCTCATTCAGCATTTGCATGGTTTGTTGAAAACCGGACA
TGGCACTCCAGTCGCCTTCCCGTTCCGCTATCGGCTGAATTTGATTGCGAGTGAGATATTTATG
CCAGCCAGCCAGACGCAGACGCGCCGAGACAGAACTTAATGGGCCCGCTAACAGCGCGATTT
GCTGGTGACCCAATGCGACCAGATGCTCCACGCCCAGTCGCGTACCGTCTTCATGGGAGAAAA
TAATACTGTTGATGGGTGTCTGGTCAGAGACATCAAGAAATAACGCCGGAACATTAGTGCAGG
CAGCTTCCACAGCAATGGCATCCTGGTCATCCAGCGGATAGTTAATGATCAGCCCACTGACGC
GTTGCGCGAGAAGATTGTGCACCGCCGCTTTACAGGCTTCGACGCCGCTTCGTTCTACCATCGA
CACCACCACGCTGGCACCCAGTTGATCGGCGCGAGATTTAATCGCCGCGACAATTTCGACGG
CGCGTGCAGGGCCAGACTGGAGGTGGCAACGCCAATCAGCAACGACTGTTTGCCCGCCAGTTG
TTGTGCCACGCGGTTGGGAATGTAATTCAGCTCCGCCATCGCCGCTTCCACTTTTTCCCGCGTTT
TCGCAGAAACGTGGCTGGCCTGGTTCACCACGCGGGAAACGGTCTGATAAGAGACACCGGCAT
ACTCTGCGACATCGTATAACGTTACTGGTTTCACATTCACCACCCTGAATTGACTCTCTTCCGG
GCGCTATCATGCCATACCGCGAAAGGTTTTGCGCCATTCGATGGTGTCCGGGATCTCGACGCTC
TCCCTTATGCGACTCCTGCATTAGGAAGCAGCCCAGTAGTAGGTTGAGGCCGTTGAGCACCGC
CGCCGCAAGGAATGGTGCATGCAAGGAGATGGCGCCCAACAGTCCCCCGGCCACGGGGCCTG
CCACCATACCCACGCCGAAACAAGCGCTCATGAGCCCGAAGTGGCGAGCCCGATCTTCCCCAT
CGGTGATGTCGGCGATATAGGCGCCAGCAACCGCACCTGTGGCGCCGGTGATGCCGGCCACGA
TGCGTCCGGCGTAGAGGATCGAGATCTCGATCCCGCGAAATTAATACGACTCACTATAGGGGA
ATTGTGAGCGGATAACAATTCCCCTCTAGAAATAATTTTGTTTAACTTTAAGAAGGAGATATAC
CATGGGCAGCAGCCATCATCATCATCATCACAGCAGCGGCCTGGTGCCGCGCGGCAGCCATAT
GGCTAGTATGGATCTGGATGCAGTAAGGATTAAAGTGGACACAGTAAATGCAAAACCGGGAG
ACACAGTAAATATACCTGTAAGATTCAGTGGTATACCATCCAAGGGAATAGCAAACTGTGACT
TTGTATACAGCTATGACCCGAATGTACTTGAGATAATAGAGATAAAACCGGGAGAATTGATAG
TTGACCCGAATCCTACCAAGAGCTTTGATACTGCAGTATATCCTGACAGAAAGATGATAGTAT
TCCTGTTTGCGGAAGACAGCGGAACAGGAGCGTATGCAATAACTAAAGACGGAGTATTTGCTA
CGATAGTAGCGAAAGTAAAAGAAGGAGCACCTAACGGGCTCAGTGTAATCAAATTTGTAGAA
GTAGGCGGATTTGCGAACAATGACCTTGTAGAACAGAAGACACAGTTCTTTGACGGTGGAGTA
AATGTTGGAGATACAACAGAACCTGCAACACCTACAACACCTGTAACAACACCGACAACAAC
AGATGATCTAGATGCAGCTAGCATGGCATCGGGTAGCGGTCTTTGCAAGACGACGAGTAA
CTTTATTTGGGGCCAGTTACTCTTGCTTGGAGAGGGAATCCCCGACCCAGGCGACATTTT
CAACACCGGTTCGTCGCTGTTCAAACAAATCAGCGACAAAATGGGACTCGCCATTCCGG
GCACCAACTGGATCGGCCAAGCGGCGGAAGCTTACCTAAACCAGAACATCGCGCAACAA
CTTCGCGCACAGGTGATGGGCGATCTCGACAAATTAACCGGCAACATGATCTCGAATCA
GGCCAAATACGTCTCCGATACGCGCGACGTCCTGCGGGCCATGAAGAAGATGATTGACG
GTGTCTACAAGGTTTGTAAGGGCCTCGAAAAGATTCCGCTGCTCGGCCACTTGTGGTCGT
GGGAGCTCGCAATCCCTATGTCCGGCATCGCGATGGCCGTTGTCGGCGGCGCATTGCTC
TATCTAACGATTATGACGCTGATGAATGCGACCAACCTGAGGGGAATTCTCGGCAGGCT
GATCGAGATGTTGACGACCTTGCCAAAGTTCCCCGGCCTGCCCGGGTTGCCCAGCCTGC
CCGACATCATCGACGGCCTCTGGCCGCCGAAGTTGCCCGACATTCCGATCCCCGGCCTG
CCCGACATCCCGGGCCTACCCGACTTCAAATGGCCGCCCACCCCCGGCAGCCCGTTGTT
CCCCGACCTCCCGTCGTTCCCAGGGTTCCCCGGGTTCCCGGAGTTCCCCGCCATCCCCG
GGTTCCCCGCACTGCCCGGGTTGCCCAGCATTCCCAACTTGTTCCCCGGCTTGCCGGGTC
TGGGCGACCTGCTGCCCGGCGTAGGCGATTTGGGCAAGTTACCCACCTGGACTGAGCTG
GCCGCTTTGCCTGACTTCTTGGGCGGCTTCGCCGGCCTGCCCAGCTTGGGTTTTGGCAAT
CTGCTCAGCTTTGCCAGTTTGCCCACCGTGGGTCAGGTGACCGCCACCATGGGTCAGCT
GCAACAGCTCGTGGCGGCCGGCGGTGGCCCCAGCCAACTGGCCAGCATGGGCAGCCAA
CAAGCGCAACTGATCTCGTCGCAGGCCCAGCAAGGAGGCCAGCAGCACGCCACCCTCGT
GAGCGACAAGAAGGAAGACGAGGAAGGCGTGGCCGAGGCGGAGCGTGCACCCATCGAC
GCTGGCACCGCGGCCAGCCAACGGGGGCAGGAGGGGACCGTCCTTTGACTCGAGTAAGC
GGCCGCACTCGAGCACCACCACCACCACCACTGAGATCCGGCTGCTAACAAAGCCCGAAAGGA
AGCTGAGTTGGCTGCTGCCACCGCTGAGCAATAACTAGCATAACCCCTTGGGGCCTCTAAACG
GGTCTTGAGGGGTTTTTTGCTGAAAGGAGGAACTATATCCGGAT
Protein sequence - Rv3864 - C2363 Ecoli-pET28[6xHis-CthermoCohesin (underlined)-
m.tbRv3864 (bold)];
(SEQ ID NO: 199)
MGSSHHHHHHSSGLVPRGSHMASMDLDAVRIKVDTVNAKPGDTVNIPVRFSGIPSKGIANCDFVYS
YDPNVLEIIEIKPGELIVDPNPTKSFDTAVYPDRKMIVFLFAEDSGTGAYAITKDGVFATIVAKVKEG
APNGLSVIKFVEVGGFANNDLVEQKTQFFDGGVNVGDTTEPATPTTPVTTPTTTDDLDAASMASG
SGLCKTTSNFIWGQLLLLGEGIPDPGDIFNTGSSLFKQISDKMGLAIPGTNWIGQAAEAYLNQ
NIAQQLRAQVMGDLDKLTGNMISNQAKYVSDTRDVLRAMKKMIDGVYKVCKGLEKIPLLG
HLWSWELAIPMSGIAMAVVGGALLYLTIMTLMNATNLRGILGRLIEMLTTLPKFPGLPGLPS
LPDIIDGLWPPKLPDIPIPGLPDIPGLPDFKWPPTPGSPLFPDLPSFPGFPGFPEFPAIPGFPALPG
LPSIPNLFPGLPGLGDLLPGVGDLGKLPTWTELAALPDFLGGFAGLPSLGFGNLLSFASLPTV
GQVTATMGQLQQLVAAGGGPSQLASMGSQQAQLISSQAQQGGQQHATLVSDKKEDEEGVA
EAERAPIDAGTAASQRGQEGTVLLE
Rv3881 - C2365 Ecoli-pET28[6xHis-CthermoCohesin (underlined)-m.tbRv3881 (bold)]
Additional modifications are in italics.
(SEQ ID NO: 200)
TGGCGAATGGGACGCGCCCTGTAGCGGCGCATTAAGCGCGGCGGGTGTGGTGGTTACGCGCAG
CGTGACCGCTACACTTGCCAGCGCCCTAGCGCCCGCTCCTTTCGCTTTCTTCCCTTCCTTTCTCG
CCACGTTCGCCGGCTTTCCCCGTCAAGCTCTAAATCGGGGGCTCCCTTTAGGGTTCCGATTTAG
TGCTTTACGGCACCTCGACCCCAAAAAACTTGATTAGGGTGATGGTTCACGTAGTGGGCCATC
GCCCTGATAGACGGTTTTTCGCCCTTTGACGTTGGAGTCCACGTTCTTTAATAGTGGACTCTTGT
TCCAAACTGGAACAACACTCAACCCTATCTCGGTCTATTCTTTTGATTTATAAGGGATTTTGCC
GATTTCGGCCTATTGGTTAAAAAATGAGCTGATTTAACAAAAATTTAACGCGAATTTTAACAA
AATATTAACGTTTACAATTTCAGGTGGCACTTTTCGGGGAAATGTGCGCGGAACCCCTATTTGT
TTATTTTTCTAAATACATTCAAATATGTATCCGCTCATGAATTAATTCTTAGAAAAACTCATCG
AGCATCAAATGAAACTGCAATTTATTCATATCAGGATTATCAATACCATATTTTTGAAAAAGCC
GTTTCTGTAATGAAGGAGAAAACTCACCGAGGCAGTTCCATAGGATGGCAAGATCCTGGTATC
GGTCTGCGATTCCGACTCGTCCAACATCAATACAACCTATTAATTTCCCCTCGTCAAAAATAAG
GTTATCAAGTGAGAAATCACCATGAGTGACGACTGAATCCGGTGAGAATGGCAAAAGTTTATG
CATTTCTTTCCAGACTTGTTCAACAGGCCAGCCATTACGCTCGTCATCAAAATCACTCGCATCA
ACCAAACCGTTATTCATTCGTGATTGCGCCTGAGCGAGACGAAATACGCGATCGCTGTTAAAA
GGACAATTACAAACAGGAATCGAATGCAACCGGCGCAGGAACACTGCCAGCGCATCAACAAT
ATTTTCACCTGAATCAGGATATTCTTCTAATACCTGGAATGCTGTTTTCCCGGGGATCGCAGTG
GTGAGTAACCATGCATCATCAGGAGTACGGATAAAATGCTTGATGGTCGGAAGAGGCATAAAT
TCCGTCAGCCAGTTTAGTCTGACCATCTCATCTGTAACATCATTGGCAACGCTACCTTTGCCAT
GTTTCAGAAACAACTCTGGCGCATCGGGCTTCCCATACAATCGATAGATTGTCGCACCTGATTG
CCCGACATTATCGCGAGCCCATTTATACCCATATAAATCAGCATCCATGTTGGAATTTAATCGC
GGCCTAGAGCAAGACGTTTCCCGTTGAATATGGCTCATAACACCCCTTGTATTACTGTTTATGT
AAGCAGACAGTTTTATTGTTCATGACCAAAATCCCTTAACGTGAGTTTTCGTTCCACTGAGCGT
CAGACCCCGTAGAAAAGATCAAAGGATCTTCTTGAGATCCTTTTTTTCTGCGCGTAATCTGCTG
CTTGCAAACAAAAAAACCACCGCTACCAGCGGTGGTTTGTTTGCCGGATCAAGAGCTACCAAC
TCTTTTTCCGAAGGTAACTGGCTTCAGCAGAGCGCAGATACCAAATACTGTCCTTCTAGTGTAG
CCGTAGTTAGGCCACCACTTCAAGAACTCTGTAGCACCGCCTACATACCTCGCTCTGCTAATCC
TGTTACCAGTGGCTGCTGCCAGTGGCGATAAGTCGTGTCTTACCGGGTTGGACTCAAGACGAT
AGTTACCGGATAAGGCGCAGCGGTCGGGCTGAACGGGGGGTTCGTGCACACAGCCCAGCTTG
GAGCGAACGACCTACACCGAACTGAGATACCTACAGCGTGAGCTATGAGAAAGCGCCACGCT
TCCCGAAGGGAGAAAGGCGGACAGGTATCCGGTAAGCGGCAGGGTCGGAACAGGAGAGCGC
ACGAGGGAGCTTCCAGGGGGAAACGCCTGGTATCTTTATAGTCCTGTCGGGTTTCGCCACCTCT
GACTTGAGCGTCGATTTTTGTGATGCTCGTCAGGGGGGCGGAGCCTATGGAAAAACGCCAGCA
ACGCGGCCTTTTTACGGTTCCTGGCCTTTTGCTGGCCTTTTGCTCACATGTTCTTTCCTGCGTTA
TCCCCTGATTCTGTGGATAACCGTATTACCGCCTTTGAGTGAGCTGATACCGCTCGCCGCAGCC
GAACGACCGAGCGCAGCGAGTCAGTGAGCGAGGAAGCGGAAGAGCGCCTGATGCGGTATTTT
CTCCTTACGCATCTGTGCGGTATTTCACACCGCATATATGGTGCACTCTCAGTACAATCTGCTC
TGATGCCGCATAGTTAAGCCAGTATACACTCCGCTATCGCTACGTGACTGGGTCATGGCTGCGC
CCCGACACCCGCCAACACCCGCTGACGCGCCCTGACGGGCTTGTCTGCTCCCGGCATCCGCTTA
CAGACAAGCTGTGACCGTCTCCGGGAGCTGCATGTGTCAGAGGTTTTCACCGTCATCACCGAA
ACGCGCGAGGCAGCTGCGGTAAAGCTCATCAGCGTGGTCGTGAAGCGATTCACAGATGTCTGC
CTGTTCATCCGCGTCCAGCTCGTTGAGTTTCTCCAGAAGCGTTAATGTCTGGCTTCTGATAAAG
CGGGCCATGTTAAGGGCGGTTTTTTCCTGTTTGGTCACTGATGCCTCCGTGTAAGGGGGATTTC
TGTTCATGGGGGTAATGATACCGATGAAACGAGAGAGGATGCTCACGATACGGGTTACTGATG
ATGAACATGCCCGGTTACTGGAACGTTGTGAGGGTAAACAACTGGCGGTATGGATGCGGCGGG
ACCAGAGAAAAATCACTCAGGGTCAATGCCAGCGCTTCGTTAATACAGATGTAGGTGTTCCAC
AGGGTAGCCAGCAGCATCCTGCGATGCAGATCCGGAACATAATGGTGCAGGGCGCTGACTTCC
GCGTTTCCAGACTTTACGAAACACGGAAACCGAAGACCATTCATGTTGTTGCTCAGGTCGCAG
ACGTTTTGCAGCAGCAGTCGCTTCACGTTCGCTCGCGTATCGGTGATTCATTCTGCTAACCAGT
AAGGCAACCCCGCCAGCCTAGCCGGGTCCTCAACGACAGGAGCACGATCATGCGCACCCGTG
GGGCCGCCATGCCGGCGATAATGGCCTGCTTCTCGCCGAAACGTTTGGTGGCGGGACCAGTGA
CGAAGGCTTGAGCGAGGGCGTGCAAGATTCCGAATACCGCAAGCGACAGGCCGATCATCGTC
GCGCTCCAGCGAAAGCGGTCCTCGCCGAAAATGACCCAGAGCGCTGCCGGCACCTGTCCTACG
AGTTGCATGATAAAGAAGACAGTCATAAGTGCGGCGACGATAGTCATGCCCCGCGCCCACCGG
AAGGAGCTGACTGGGTTGAAGGCTCTCAAGGGCATCGGTCGAGATCCCGGTGCCTAATGAGTG
AGCTAACTTACATTAATTGCGTTGCGCTCACTGCCCGCTTTCCAGTCGGGAAACCTGTCGTGCC
AGCTGCATTAATGAATCGGCCAACGCGCGGGGAGAGGCGGTTTGCGTATTGGGCGCCAGGGTG
GTTTTTCTTTTCACCAGTGAGACGGGCAACAGCTGATTGCCCTTCACCGCCTGGCCCTGAGAGA
GTTGCAGCAAGCGGTCCACGCTGGTTTGCCCCAGCAGGCGAAAATCCTGTTTGATGGTGGTTA
ACGGCGGGATATAACATGAGCTGTCTTCGGTATCGTCGTATCCCACTACCGAGATATCCGCAC
CAACGCGCAGCCCGGACTCGGTAATGGCGCGCATTGCGCCCAGCGCCATCTGATCGTTGGCAA
CCAGCATCGCAGTGGGAACGATGCCCTCATTCAGCATTTGCATGGTTTGTTGAAAACCGGACA
TGGCACTCCAGTCGCCTTCCCGTTCCGCTATCGGCTGAATTTGATTGCGAGTGAGATATTTATG
CCAGCCAGCCAGACGCAGACGCGCCGAGACAGAACTTAATGGGCCCGCTAACAGCGCGATTT
GCTGGTGACCCAATGCGACCAGATGCTCCACGCCCAGTCGCGTACCGTCTTCATGGGAGAAAA
TAATACTGTTGATGGGTGTCTGGTCAGAGACATCAAGAAATAACGCCGGAACATTAGTGCAGG
CAGCTTCCACAGCAATGGCATCCTGGTCATCCAGCGGATAGTTAATGATCAGCCCACTGACGC
GTTGCGCGAGAAGATTGTGCACCGCCGCTTTACAGGCTTCGACGCCGCTTCGTTCTACCATCGA
CACCACCACGCTGGCACCCAGTTGATCGGCGCGAGATTTAATCGCCGCGACAATTTGCGACGG
CGCGTGCAGGGCCAGACTGGAGGTGGCAACGCCAATCAGCAACGACTGTTTGCCCGCCAGTTG
TTGTGCCACGCGGTTGGGAATGTAATTCAGCTCCGCCATCGCCGCTTCCACTTTTTCCCGCGTTT
TCGCAGAAACGTGGCTGGCCTGGTTCACCACGCGGGAAACGGTCTGATAAGAGACACCGGCAT
ACTCTGCGACATCGTATAACGTTACTGGTTTCACATTCACCACCCTGAATTGACTCTCTTCCGG
GCGCTATCATGCCATACCGCGAAAGGTTTTGCGCCATTCGATGGTGTCCGGGATCTCGACGCTC
TCCCTTATGCGACTCCTGCATTAGGAAGCAGCCCAGTAGTAGGTTGAGGCCGTTGAGCACCGC
CGCCGCAAGGAATGGTGCATGCAAGGAGATGGCGCCCAACAGTCCCCCGGCCACGGGGCCTG
CCACCATACCCACGCCGAAACAAGCGCTCATGAGCCCGAAGTGGCGAGCCCGATCTTCCCCAT
CGGTGATGTCGGCGATATAGGCGCCAGCAACCGCACCTGTGGCGCCGGTGATGCCGGCCACGA
TGCGTCCGGCGTAGAGGATCGAGATCTCGATCCCGCGAAATTAATACGACTCACTATAGGGGA
ATTGTGAGCGGATAACAATTCCCCTCTAGAAATAATTTTGTTTAACTTTAAGAAGGAGATATAC
CATGGGCAGCAGCCATCATCATCATCATCACAGCAGCGGCCTGGTGCCGCGCGGCAGCCATAT
GGCTAGTATGGATCTGGATGCAGTAAGGATTAAAGTGGACACAGTAAATGCAAAACCGGGAG
ACACAGTAAATATACCTGTAAGATTCAGTGGTATACCATCCAAGGGAATAGCAAACTGTGACT
TTGTATACAGCTATGACCCGAATGTACTTGAGATAATAGAGATAAAACCGGGAGAATTGATAG
TTGACCCGAATCCTACCAAGAGCTTTGATACTGCAGTATATCCTGACAGAAAGATGATAGTAT
TCCTGTTTGCGGAAGACAGCGGAACAGGAGCGTATGCAATAACTAAAGACGGAGTATTTGCTA
CGATAGTAGCGAAAGTAAAAGAAGGAGCACCTAACGGGCTCAGTGTAATCAAATTTGTAGAA
GTAGGCGGATTTGCGAACAATGACCTTGTAGAACAGAAGACACAGTTCTTTGACGGTGGAGTA
AATGTTGGAGATACAACAGAACCTGCAACACCTACAACACCTGTAACAACACCGACAACAAC
AGATGATCTAGATGCAGCTAGC [symbol] AGCAAGAGAT
TTTGAACAGGGCCAACGAGGTGGAGGCCCCGATGGCGGACCCACCGACTGATGTCCCCA
TCACACCGTGCGAACTCACGGCGGCTAAAAACGCCGCCCAACAGCTGGTATTGTCCGCC
GACAACATGCGGGAATACCTGGCGGCCGGTGCCAAAGAGCGGCAGCGTCTGGCGACCTC
GCTGCGCAACGCGGCCAAGGCGTATGGCGAGGTTGATGAGGAGGCTGCGACCGCGCTG
GACAACGACGGCGAAGGAACTGTGCAGGCAGAATCGGCCGGGGCCGTCGGAGGGGACA
GTTCGGCCGAACTAACCGATACGCCGAGGGTGGCCACGGCCGGTGAACCCAACTTCATG
GATCTCAAAGAAGCGGCAAGGAAGCTCGAAACGGGCGACCAAGGCGCATCGCTCGCGCA
CTTTGCGGATGGGTGGAACACTTTCAACCTGACGCTGCAAGGCGACGTCAAGCGGTTCC
GGGGGTTTGACAACTGGGAAGGCGATGCGGCTACCGCTTGCGAGGCTTCGCTCGATCAA
CAACGGCAATGGATACTCCACATGGCCAAATTGAGCGCTGCGATGGCCAAGCAGGCTCA
ATATGTCGCGCAGCTGCACGTGTGGGCTAGGCGGGAACATCCGACTTATGAAGACATAG
TCGGGCTCGAACGGCTTTACGCGGAAAACCCTTCGGCCCGCGACCAAATTCTCCCGGTG
TACGCGGAGTATCAGCAGAGGTCGGAGAAGGTGCTGACCGAATACAACAACAAGGCAGC
CCTGGAACCGGTAAACCCGCCGAAGCCTCCCCCCGCCATCAAGATCGACCCGCCCCCGC
CTCCGCAAGAGCAGGGATTGATCCCTGGCTTCCTGATGCCGCCGTCTGACGGCTCCGGT
GTGACTCCCGGTACCGGGATGCCAGCCGCACCGATGGTTCCGCCTACCGGATCGCCGGG
TGGTGGCCTCCCGGCTGACACGGCGGCGCAGCTGACGTCGGCTGGGCGGGAAGCCGCA
GCGCTGTCGGGCGACGTGGCGGTCAAAGCGGCATCGCTCGGTGGCGGTGGAGGCGGCG
GGGTGCCGTCGGCGCCGTTGGGATCCGCGATCGGGGGCGCCGAATCGGTGCGGCCCGC
TGGCGCTGGTGACATTGCCGGCTTAGGCCAGGGAAGGGCCGGCGGCGGCGCCGCGCTG
GGCGGCGGTGGCATGGGAATGCCGATGGGTGCCGCGCATCAGGGACAAGGGGGCGCCA
AGTCCAAGGGTTCTCAGCAGGAAGACGAGGCGCTCTACACCGAGGATCGGGCATGGACC
GAGGCCGTCATTGGTAAC [symbol] GAATTCTGAGCGGCC
GCACTCGAGCACCACCACCACCACCACTGAGATCCGGCTGCTAACAAAGCCCGAAAGGAAGCT
GAGTTGGCTGCTGCCACCGCTGAGCAATAACTAGCATAACCCCTTGGGGCCTCTAAACGGGTC
TTGAGGGGTTTTTTGCTGAAAGGAGGAACTATATCCGGAT
Protein sequence - Rv3881 - C2365 Ecoli-pET28[6xHis-CthermoCohesin (underlined)-
m.tbRv3881 (bold)]
(SEQ ID NO: 201)
MGSSHHHHHHSSGLVPRGSHMASMDLDAVRIKVDTVNAKPGDTVNIPVRFSGIPSKGIANCDFVYS
YDPNVLEIIEIKPGELIVDPNPTKSFDTAVYPDRKMIVFLFAEDSGTGAYAITKDGVFATIVAKVKEG
APNGLSVIKFVEVGGFANNDLVEQKTQFFDGGVNVGDTTEPATPTTPVTTPTTTDDLDAASMTQS
QTVTVDQQEILNRANEVEAPMADPPTDVPITPCELTAAKNAAQQLVLSADNMREYLAAGAKE
RQRLATSLRNAAKAYGEVDEEAATALDNDGEGTVQAESAGAVGGDSSAELTDTPRVATAGE
PNFMDLKEAARKLETGDQGASLAHFADGWNTFNLTLQGDVKRFRGFDNWEGDAATACEAS
LDQQRQWILHMAKLSAAMAKQAQYVAQLHVWARREHPTYEDIVGLERLYAENPSARDQILP
VYAEYQQRSEKVLTEYNNKAALEPVNPPKPPPAIKIDPPPPPQEQGLIPGFLMPPSDGSGVTPG
TGMPAAPMVPPTGSPGGGLPADTAAQLTSAGREAAALSGDVAVKAASLGGGGGGGVPSAPL
GSAIGGAESVRPAGAGDIAGLGQGRAGGGAALGGGGMGMPMGAAHQGQGGAKSKGSQQE
DEALYTEDRAWTEAVIGNRRRQDSKESK
Rv2660 - C2366 Ecoli-pET28[6xHis-CthermoCohesin (underlined)-m.tbRv2660 (bold)]
(SEQ ID NO: 202)
TGGCGAATGGGACGCGCCCTGTAGCGGCGCATTAAGCGCGGCGGGTGTGGTGGTTACGCGCAG
CGTGACCGCTACACTTGCCAGCGCCCTAGCGCCCGCTCCTTTCGCTTTCTTCCCTTCCTTTCTCG
CCACGTTCGCCGGCTTTCCCCGTCAAGCTCTAAATCGGGGGCTCCCTTTAGGGTTCCGATTTAG
TGCTTTACGGCACCTCGACCCCAAAAAACTTGATTAGGGTGATGGTTCACGTAGTGGGCCATC
GCCCTGATAGACGGTTTTTCGCCCTTTGACGTTGGAGTCCACGTTCTTTAATAGTGGACTCTTGT
TCCAAACTGGAACAACACTCAACCCTATCTCGGTCTATTCTTTTGATTTATAAGGGATTTTGCC
GATTTCGGCCTATTGGTTAAAAAATGAGCTGATTTAACAAAAATTTAACGCGAATTTTAACAA
AATATTAACGTTTACAATTTCAGGTGGCACTTTTCGGGGAAATGTGCGCGGAACCCCTATTTGT
TTATTTTTCTAAATACATTCAAATATGTATCCGCTCATGAATTAATTCTTAGAAAAACTCATCG
AGCATCAAATGAAACTGCAATTTATTCATATCAGGATTATCAATACCATATTTTTGAAAAAGCC
GTTTCTGTAATGAAGGAGAAAACTCACCGAGGCAGTTCCATAGGATGGCAAGATCCTGGTATC
GGTCTGCGATTCCGACTCGTCCAACATCAATACAACCTATTAATTTCCCCTCGTCAAAAATAAG
GTTATCAAGTGAGAAATCACCATGAGTGACGACTGAATCCGGTGAGAATGGCAAAAGTTTATG
CATTTCTTTCCAGACTTGTTCAACAGGCCAGCCATTACGCTCGTCATCAAAATCACTCGCATCA
ACCAAACCGTTATTCATTCGTGATTGCGCCTGAGCGAGACGAAATACGCGATCGCTGTTAAAA
GGACAATTACAAACAGGAATCGAATGCAACCGGCGCAGGAACACTGCCAGCGCATCAACAAT
ATTTTCACCTGAATCAGGATATTCTTCTAATACCTGGAATGCTGTTTTCCCGGGGATCGCAGTG
GTGAGTAACCATGCATCATCAGGAGTACGGATAAAATGCTTGATGGTCGGAAGAGGCATAAAT
TCCGTCAGCCAGTTTAGTCTGACCATCTCATCTGTAACATCATTGGCAACGCTACCTTTGCCAT
GTTTCAGAAACAACTCTGGCGCATCGGGCTTCCCATACAATCGATAGATTGTCGCACCTGATTG
CCCGACATTATCGCGAGCCCATTTATACCCATATAAATCAGCATCCATGTTGGAATTTAATCGC
GGCCTAGAGCAAGACGTTTCCCGTTGAATATGGCTCATAACACCCCTTGTATTACTGTTTATGT
AAGCAGACAGTTTTATTGTTCATGACCAAAATCCCTTAACGTGAGTTTTCGTTCCACTGAGCGT
CAGACCCCGTAGAAAAGATCAAAGGATCTTCTTGAGATCCTTTTTTTCTGCGCGTAATCTGCTG
CTTGCAAACAAAAAAACCACCGCTACCAGCGGTGGTTTGTTTGCCGGATCAAGAGCTACCAAC
TCTTTTTCCGAAGGTAACTGGCTTCAGCAGAGCGCAGATACCAAATACTGTCCTTCTAGTGTAG
CCGTAGTTAGGCCACCACTTCAAGAACTCTGTAGCACCGCCTACATACCTCGCTCTGCTAATCC
TGTTACCAGTGGCTGCTGCCAGTGGCGATAAGTCGTGTCTTACCGGGTTGGACTCAAGACGAT
AGTTACCGGATAAGGCGCAGCGGTCGGGCTGAACGGGGGGTTCGTGCACACAGCCCAGCTTG
GAGCGAACGACCTACACCGAACTGAGATACCTACAGCGTGAGCTATGAGAAAGCGCCACGCT
TCCCGAAGGGAGAAAGGCGGACAGGTATCCGGTAAGCGGCAGGGTCGGAACAGGAGAGCGC
ACGAGGGAGCTTCCAGGGGGAAACGCCTGGTATCTTTATAGTCCTGTCGGGTTTCGCCACCTCT
GACTTGAGCGTCGATTTTTGTGATGCTCGTCAGGGGGGCGGAGCCTATGGAAAAACGCCAGCA
ACGCGGCCTTTTTACGGTTCCTGGCCTTTTGCTGGCCTTTTGCTCACATGTTCTTTCCTGCGTTA
TCCCCTGATTCTGTGGATAACCGTATTACCGCCTTTGAGTGAGCTGATACCGCTCGCCGCAGCC
GAACGACCGAGCGCAGCGAGTCAGTGAGCGAGGAAGCGGAAGAGCGCCTGATGCGGTATTTT
CTCCTTACGCATCTGTGCGGTATTTCACACCGCATATATGGTGCACTCTCAGTACAATCTGCTC
TGATGCCGCATAGTTAAGCCAGTATACACTCCGCTATCGCTACGTGACTGGGTCATGGCTGCGC
CCCGACACCCGCCAACACCCGCTGACGCGCCCTGACGGGCTTGTCTGCTCCCGGCATCCGCTTA
CAGACAAGCTGTGACCGTCTCCGGGAGCTGCATGTGTCAGAGGTTTTCACCGTCATCACCGAA
ACGCGCGAGGCAGCTGCGGTAAAGCTCATCAGCGTGGTCGTGAAGCGATTCACAGATGTCTGC
CTGTTCATCCGCGTCCAGCTCGTTGAGTTTCTCCAGAAGCGTTAATGTCTGGCTTCTGATAAAG
CGGGCCATGTTAAGGGCGGTTTTTTCCTGTTTGGTCACTGATGCCTCCGTGTAAGGGGGATTTC
TGTTCATGGGGGTAATGATACCGATGAAACGAGAGAGGATGCTCACGATACGGGTTACTGATG
ATGAACATGCCCGGTTACTGGAACGTTGTGAGGGTAAACAACTGGCGGTATGGATGCGGCGGG
ACCAGAGAAAAATCACTCAGGGTCAATGCCAGCGCTTCGTTAATACAGATGTAGGTGTTCCAC
AGGGTAGCCAGCAGCATCCTGCGATGCAGATCCGGAACATAATGGTGCAGGGCGCTGACTTCC
GCGTTTCCAGACTTTACGAAACACGGAAACCGAAGACCATTCATGTTGTTGCTCAGGTCGCAG
ACGTTTTGCAGCAGCAGTCGCTTCACGTTCGCTCGCGTATCGGTGATTCATTCTGCTAACCAGT
AAGGCAACCCCGCCAGCCTAGCCGGGTCCTCAACGACAGGAGCACGATCATGCGCACCCGTG
GGGCCGCCATGCCGGCGATAATGGCCTGCTTCTCGCCGAAACGTTTGGTGGCGGGACCAGTGA
CGAAGGCTTGAGCGAGGGCGTGCAAGATTCCGAATACCGCAAGCGACAGGCCGATCATCGTC
GCGCTCCAGCGAAAGCGGTCCTCGCCGAAAATGACCCAGAGCGCTGCCGGCACCTGTCCTACG
AGTTGCATGATAAAGAAGACAGTCATAAGTGCGGCGACGATAGTCATGCCCCGCGCCCACCGG
AAGGAGCTGACTGGGTTGAAGGCTCTCAAGGGCATCGGTCGAGATCCCGGTGCCTAATGAGTG
AGCTAACTTACATTAATTGCGTTGCGCTCACTGCCCGCTTTCCAGTCGGGAAACCTGTCGTGCC
AGCTGCATTAATGAATCGGCCAACGCGCGGGGAGAGGCGGTTTGCGTATTGGGCGCCAGGGTG
GTTTTTCTTTTCACCAGTGAGACGGGCAACAGCTGATTGCCCTTCACCGCCTGGCCCTGAGAGA
GTTGCAGCAAGCGGTCCACGCTGGTTTGCCCCAGCAGGCGAAAATCCTGTTTGATGGTGGTTA
ACGGCGGGATATAACATGAGCTGTCTTCGGTATCGTCGTATCCCACTACCGAGATATCCGCAC
CAACGCGCAGCCCGGACTCGGTAATGGCGCGCATTGCGCCCAGCGCCATCTGATCGTTGGCAA
CCAGCATCGCAGTGGGAACGATGCCCTCATTCAGCATTTGCATGGTTTGTTGAAAACCGGACA
TGGCACTCCAGTCGCCTTCCCGTTCCGCTATCGGCTGAATTTGATTGCGAGTGAGATATTTATG
CCAGCCAGCCAGACGCAGACGCGCCGAGACAGAACTTAATGGGCCCGCTAACAGCGCGATTT
GCTGGTGACCCAATGCGACCAGATGCTCCACGCCCAGTCGCGTACCGTCTTCATGGGAGAAAA
TAATACTGTTGATGGGTGTCTGGTCAGAGACATCAAGAAATAACGCCGGAACATTAGTGCAGG
CAGCTTCCACAGCAATGGCATCCTGGTCATCCAGCGGATAGTTAATGATCAGCCCACTGACGC
GTTGCGCGAGAAGATTGTGCACCGCCGCTTTACAGGCTTCGACGCCGCTTCGTTCTACCATCGA
CACCACCACGCTGGCACCCAGTTGATCGGCGCGAGATTTAATCGCCGCGACAATTTGCGACGG
CGCGTGCAGGGCCAGACTGGAGGTGGCAACGCCAATCAGCAACGACTGTTTGCCCGCCAGTTG
TTGTGCCACGCGGTTGGGAATGTAATTCAGCTCCGCCATCGCCGCTTCCACTTTTTCCCGCGTTT
TCGCAGAAACGTGGCTGGCCTGGTTCACCACGCGGGAAACGGTCTGATAAGAGACACCGGCAT
ACTCTGCGACATCGTATAACGTTACTGGTTTCACATTCACCACCCTGAATTGACTCTCTTCCGG
GCGCTATCATGCCATACCGCGAAAGGTTTTGCGCCATTCGATGGTGTCCGGGATCTCGACGCTC
TCCCTTATGCGACTCCTGCATTAGGAAGCAGCCCAGTAGTAGGTTGAGGCCGTTGAGCACCGC
CGCCGCAAGGAATGGTGCATGCAAGGAGATGGCGCCCAACAGTCCCCCGGCCACGGGGCCTG
CCACCATACCCACGCCGAAACAAGCGCTCATGAGCCCGAAGTGGCGAGCCCGATCTTCCCCAT
CGGTGATGTCGGCGATATAGGCGCCAGCAACCGCACCTGTGGCGCCGGTGATGCCGGCCACGA
TGCGTCCGGCGTAGAGGATCGAGATCTCGATCCCGCGAAATTAATACGACTCACTATAGGGGA
ATTGTGAGCGGATAACAATTCCCCTCTAGAAATAATTTTGTTTAACTTTAAGAAGGAGATATAC
CATGGGCAGCAGCCATCATCATCATCATCACAGCAGCGGCCTGGTGCCGCGCGGCAGCCATAT
GGCTAGTATGGATCTGGATGCAGTAAGGATTAAAGTGGACACAGTAAATGCAAAACCGGGAG
ACACAGTAAATATACCTGTAAGATTCAGTGGTATACCATCCAAGGGAATAGCAAACTGTGACT
TTGTATACAGCTATGACCCGAATGTACTTGAGATAATAGAGATAAAACCGGGAGAATTGATAG
TTGACCCGAATCCTACCAAGAGCTTTGATACTGCAGTATATCCTGACAGAAAGATGATAGTAT
TCCTGTTTGCGGAAGACAGCGGAACAGGAGCGTATGCAATAACTAAAGACGGAGTATTTGCTA
CGATAGTAGCGAAAGTAAAAGAAGGAGCACCTAACGGGCTCAGTGTAATCAAATTTGTAGAA
GTAGGCGGATTTGCGAACAATGACCTTGTAGAACAGAAGACACAGTTCTTTGACGGTGGAGTA
AATGTTGGAGATACAACAGAACCTGCAACACCTACAACACCTGTAACAACACCGACAACAAC
AGATGATCTAGATGCAGCTAGTGTGATAGCGGGCGTCGACCAGGCGCTTGCAGCAACAGG
CCAGGCTAGCCAGCGGGCGGCAGGCGCATCTGGTGGGGTCACCGTCGGTGTCGGCGTG
GGCACGGAACAGAGGAACCTTTCGGTGGTTGCACCGAGTCAGTTCACATTTAGTTCACG
CAGCCCAGATTTTGTGGATGAAACCGCAGGTCAATCGTGGTGCGCGATACTGGGATTGA
ACCAGTTTCACGAATTCTAGGCGGCCGCACTCGAGCACCACCACCACCACCACTGAGATCCG
GCTGCTAACAAAGCCCGAAAGGAAGCTGAGTTGGCTGCTGCCACCGCTGAGCAATAACTAGCA
TAACCCCTTGGGGCCTCTAAACGGGTCTTGAGGGGTTTTTTGCTGAAAGGAGGAACTATATCC
GGAT
Protein sequence - Rv2660 - C2366 Ecoli-pET28[6xHis-CthermoCohesin (underlined)-
m.tbRv2660 (bold)]
(SEQ ID NO: 203)
MGSSHHHHHHSSGLVPRGSHMASMDLDAVRIKVDTVNAKPGDTVNIPVRFSGIPSKGIANCDFVYS
YDPNVLEIIEIKPGELIVDPNPTKSFDTAVYPDRKMIVFLFAEDSGTGAYAITKDGVFATIVAKVKEG
APNGLSVIKFVEVGGFANNDLVEQKTQFFDGGVNVGDTTEPATPTTPVTTPTTTDDLDAASVIAGV
DQALAATGQASQRAAGASGGVTVGVGVGTEQRNLSVVAPSQFTFSSRSPDFVDETAGQSWCA
ILGLNQFHEF
Rv2873- C2362 Ecoli-pET28[6xHis-CthermoCohesin (underlined)-m.tbRv2873 (bold)]
Additional modifications are in italics.
(SEQ ID NO: 204)
TGGCGAATGGGACGCGCCCTGTAGCGGCGCATTAAGCGCGGCGGGTGTGGTGGTTACGCGCAG
CGTGACCGCTACACTTGCCAGCGCCCTAGCGCCCGCTCCTTTCGCTTTCTTCCCTTCCTTTCTCG
CCACGTTCGCCGGCTTTCCCCGTCAAGCTCTAAATCGGGGGCTCCCTTTAGGGTTCCGATTTAG
TGCTTTACGGCACCTCGACCCCAAAAAACTTGATTAGGGTGATGGTTCACGTAGTGGGCCATC
GCCCTGATAGACGGTTTTTCGCCCTTTGACGTTGGAGTCCACGTTCTTTAATAGTGGACTCTTGT
TCCAAACTGGAACAACACTCAACCCTATCTCGGTCTATTCTTTTGATTTATAAGGGATTTTGCC
GATTTCGGCCTATTGGTTAAAAAATGAGCTGATTTAACAAAAATTTAACGCGAATTTTAACAA
AATATTAACGTTTACAATTTCAGGTGGCACTTTTCGGGGAAATGTGCGCGGAACCCCTATTTGT
TTATTTTTCTAAATACATTCAAATATGTATCCGCTCATGAATTAATTCTTAGAAAAACTCATCG
AGCATCAAATGAAACTGCAATTTATTCATATCAGGATTATCAATACCATATTTTTGAAAAAGCC
GTTTCTGTAATGAAGGAGAAAACTCACCGAGGCAGTTCCATAGGATGGCAAGATCCTGGTATC
GGTCTGCGATTCCGACTCGTCCAACATCAATACAACCTATTAATTTCCCCTCGTCAAAAATAAG
GTTATCAAGTGAGAAATCACCATGAGTGACGACTGAATCCGGTGAGAATGGCAAAAGTTTATG
CATTTCTTTCCAGACTTGTTCAACAGGCCAGCCATTACGCTCGTCATCAAAATCACTCGCATCA
ACCAAACCGTTATTCATTCGTGATTGCGCCTGAGCGAGACGAAATACGCGATCGCTGTTAAAA
GGACAATTACAAACAGGAATCGAATGCAACCGGCGCAGGAACACTGCCAGCGCATCAACAAT
ATTTTCACCTGAATCAGGATATTCTTCTAATACCTGGAATGCTGTTTTCCCGGGGATCGCAGTG
GTGAGTAACCATGCATCATCAGGAGTACGGATAAAATGCTTGATGGTCGGAAGAGGCATAAAT
TCCGTCAGCCAGTTTAGTCTGACCATCTCATCTGTAACATCATTGGCAACGCTACCTTTGCCAT
GTTTCAGAAACAACTCTGGCGCATCGGGCTTCCCATACAATCGATAGATTGTCGCACCTGATTG
CCCGACATTATCGCGAGCCCATTTATACCCATATAAATCAGCATCCATGTTGGAATTTAATCGC
GGCCTAGAGCAAGACGTTTCCCGTTGAATATGGCTCATAACACCCCTTGTATTACTGTTTATGT
AAGCAGACAGTTTTATTGTTCATGACCAAAATCCCTTAACGTGAGTTTTCGTTCCACTGAGCGT
CAGACCCCGTAGAAAAGATCAAAGGATCTTCTTGAGATCCTTTTTTTCTGCGCGTAATCTGCTG
CTTGCAAACAAAAAAACCACCGCTACCAGCGGTGGTTTGTTTGCCGGATCAAGAGCTACCAAC
TCTTTTTCCGAAGGTAACTGGCTTCAGCAGAGCGCAGATACCAAATACTGTCCTTCTAGTGTAG
CCGTAGTTAGGCCACCACTTCAAGAACTCTGTAGCACCGCCTACATACCTCGCTCTGCTAATCC
TGTTACCAGTGGCTGCTGCCAGTGGCGATAAGTCGTGTCTTACCGGGTTGGACTCAAGACGAT
AGTTACCGGATAAGGCGCAGCGGTCGGGCTGAACGGGGGGTTCGTGCACACAGCCCAGCTTG
GAGCGAACGACCTACACCGAACTGAGATACCTACAGCGTGAGCTATGAGAAAGCGCCACGCT
TCCCGAAGGGAGAAAGGCGGACAGGTATCCGGTAAGCGGCAGGGTCGGAACAGGAGAGCGC
ACGAGGGAGCTTCCAGGGGGAAACGCCTGGTATCTTTATAGTCCTGTCGGGTTTCGCCACCTCT
GACTTGAGCGTCGATTTTTGTGATGCTCGTCAGGGGGGCGGAGCCTATGGAAAAACGCCAGCA
ACGCGGCCTTTTTACGGTTCCTGGCCTTTTGCTGGCCTTTTGCTCACATGTTCTTTCCTGCGTTA
TCCCCTGATTCTGTGGATAACCGTATTACCGCCTTTGAGTGAGCTGATACCGCTCGCCGCAGCC
GAACGACCGAGCGCAGCGAGTCAGTGAGCGAGGAAGCGGAAGAGCGCCTGATGCGGTATTTT
CTCCTTACGCATCTGTGCGGTATTTCACACCGCATATATGGTGCACTCTCAGTACAATCTGCTC
TGATGCCGCATAGTTAAGCCAGTATACACTCCGCTATCGCTACGTGACTGGGTCATGGCTGCGC
CCCGACACCCGCCAACACCCGCTGACGCGCCCTGACGGGCTTGTCTGCTCCCGGCATCCGCTTA
CAGACAAGCTGTGACCGTCTCCGGGAGCTGCATGTGTCAGAGGTTTTCACCGTCATCACCGAA
ACGCGCGAGGCAGCTGCGGTAAAGCTCATCAGCGTGGTCGTGAAGCGATTCACAGATGTCTGC
CTGTTCATCCGCGTCCAGCTCGTTGAGTTTCTCCAGAAGCGTTAATGTCTGGCTTCTGATAAAG
CGGGCCATGTTAAGGGCGGTTTTTTCCTGTTTGGTCACTGATGCCTCCGTGTAAGGGGGATTTC
TGTTCATGGGGGTAATGATACCGATGAAACGAGAGAGGATGCTCACGATACGGGTTACTGATG
ATGAACATGCCCGGTTACTGGAACGTTGTGAGGGTAAACAACTGGCGGTATGGATGCGGCGGG
ACCAGAGAAAAATCACTCAGGGTCAATGCCAGCGCTTCGTTAATACAGATGTAGGTGTTCCAC
AGGGTAGCCAGCAGCATCCTGCGATGCAGATCCGGAACATAATGGTGCAGGGCGCTGACTTCC
GCGTTTCCAGACTTTACGAAACACGGAAACCGAAGACCATTCATGTTGTTGCTCAGGTCGCAG
ACGTTTTGCAGCAGCAGTCGCTTCACGTTCGCTCGCGTATCGGTGATTCATTCTGCTAACCAGT
AAGGCAACCCCGCCAGCCTAGCCGGGTCCTCAACGACAGGAGCACGATCATGCGCACCCGTG
GGGCCGCCATGCCGGCGATAATGGCCTGCTTCTCGCCGAAACGTTTGGTGGCGGGACCAGTGA
CGAAGGCTTGAGCGAGGGCGTGCAAGATTCCGAATACCGCAAGCGACAGGCCGATCATCGTC
GCGCTCCAGCGAAAGCGGTCCTCGCCGAAAATGACCCAGAGCGCTGCCGGCACCTGTCCTACG
AGTTGCATGATAAAGAAGACAGTCATAAGTGCGGCGACGATAGTCATGCCCCGCGCCCACCGG
AAGGAGCTGACTGGGTTGAAGGCTCTCAAGGGCATCGGTCGAGATCCCGGTGCCTAATGAGTG
AGCTAACTTACATTAATTGCGTTGCGCTCACTGCCCGCTTTCCAGTCGGGAAACCTGTCGTGCC
AGCTGCATTAATGAATCGGCCAACGCGCGGGGAGAGGCGGTTTGCGTATTGGGCGCCAGGGTG
GTTTTTCTTTTCACCAGTGAGACGGGCAACAGCTGATTGCCCTTCACCGCCTGGCCCTGAGAGA
GTTGCAGCAAGCGGTCCACGCTGGTTTGCCCCAGCAGGCGAAAATCCTGTTTGATGGTGGTTA
ACGGCGGGATATAACATGAGCTGTCTTCGGTATCGTCGTATCCCACTACCGAGATATCCGCAC
CAACGCGCAGCCCGGACTCGGTAATGGCGCGCATTGCGCCCAGCGCCATCTGATCGTTGGCAA
CCAGCATCGCAGTGGGAACGATGCCCTCATTCAGCATTTGCATGGTTTGTTGAAAACCGGACA
TGGCACTCCAGTCGCCTTCCCGTTCCGCTATCGGCTGAATTTGATTGCGAGTGAGATATTTATG
CCAGCCAGCCAGACGCAGACGCGCCGAGACAGAACTTAATGGGCCCGCTAACAGCGCGATTT
GCTGGTGACCCAATGCGACCAGATGCTCCACGCCCAGTCGCGTACCGTCTTCATGGGAGAAAA
TAATACTGTTGATGGGTGTCTGGTCAGAGACATCAAGAAATAACGCCGGAACATTAGTGCAGG
CAGCTTCCACAGCAATGGCATCCTGGTCATCCAGCGGATAGTTAATGATCAGCCCACTGACGC
GTTGCGCGAGAAGATTGTGCACCGCCGCTTTACAGGCTTCGACGCCGCTTCGTTCTACCATCGA
CACCACCACGCTGGCACCCAGTTGATCGGCGCGAGATTTAATCGCCGCGACAATTTGCGACGG
CGCGTGCAGGGCCAGACTGGAGGTGGCAACGCCAATCAGCAACGACTGTTTGCCCGCCAGTTG
TTGTGCCACGCGGTTGGGAATGTAATTCAGCTCCGCCATCGCCGCTTCCACTTTTTCCCGCGTTT
TCGCAGAAACGTGGCTGGCCTGGTTCACCACGCGGGAAACGGTCTGATAAGAGACACCGGCAT
ACTCTGCGACATCGTATAACGTTACTGGTTTCACATTCACCACCCTGAATTGACTCTCTTCCGG
GCGCTATCATGCCATACCGCGAAAGGTTTTGCGCCATTCGATGGTGTCCGGGATCTCGACGCTC
TCCCTTATGCGACTCCTGCATTAGGAAGCAGCCCAGTAGTAGGTTGAGGCCGTTGAGCACCGC
CGCCGCAAGGAATGGTGCATGCAAGGAGATGGCGCCCAACAGTCCCCCGGCCACGGGGCCTG
CCACCATACCCACGCCGAAACAAGCGCTCATGAGCCCGAAGTGGCGAGCCCGATCTTCCCCAT
CGGTGATGTCGGCGATATAGGCGCCAGCAACCGCACCTGTGGCGCCGGTGATGCCGGCCACGA
TGCGTCCGGCGTAGAGGATCGAGATCTCGATCCCGCGAAATTAATACGACTCACTATAGGGGA
ATTGTGAGCGGATAACAATTCCCCTCTAGAAATAATTTTGTTTAACTTTAAGAAGGAGATATAC
CATGGGCAGCAGCCATCATCATCATCATCACAGCAGCGGCCTGGTGCCGCGCGGCAGCCATAT
GGCTAGTATGGATCTGGATGCAGTAAGGATTAAAGTGGACACAGTAAATGCAAAACCGGGAG
ACACAGTAAATATACCTGTAAGATTCAGTGGTATACCATCCAAGGGAATAGCAAACTGTGACT
TTGTATACAGCTATGACCCGAATGTACTTGAGATAATAGAGATAAAACCGGGAGAATTGATAG
TTGACCCGAATCCTACCAAGAGCTTTGATACTGCAGTATATCCTGACAGAAAGATGATAGTAT
TCCTGTTTGCGGAAGACAGCGGAACAGGAGCGTATGCAATAACTAAAGACGGAGTATTTGCTA
CGATAGTAGCGAAAGTAAAAGAAGGAGCACCTAACGGGCTCAGTGTAATCAAATTTGTAGAA
GTAGGCGGATTTGCGAACAATGACCTTGTAGAACAGAAGACACAGTTCTTTGACGGTGGAGTA
AATGTTGGAGATACAACAGAACCTGCAACACCTACAACACCTGTAACAACACCGACAACAAC
AGATGATCTAGATGCAGCTAGCAAACCCGTGTCGCAAGACACCAGCCCGAAACCGGCGAC
CAGCCCGGCGGCGCCCGTTACCACGGCGGCAATGGCTGACCCCGCAGCGGACCTGATTG
GTCGTGGGTGCGCGCAATACGCGGCGCAAAATCCCACCGGTCCCGGATCGGTGGCCGGA
ATGGCGCAAGACCCGGTCGCTACCGCGGCTTCCAACAACCCGATGCTCAGTACCCTGAC
CTCGGCTCTGTCGGGCAAGCTGAACCCGGATGTGAATCTGGTCGACACCCTCAACGGCG
GCGAGTACACCGTTTTCGCCCCCACCAACGCCGCATTCGACAAGCTGCCGGCGGCCACT
ATCGATCAACTCAAGACTGACGCCAAGCTGCTCAGCAGCATCCTGACCTACCACGTGATA
GCCGGCCAGGCGAGTCCGAGCAGGATCGACGGCACCCATCAGACCCTGCAAGGTGCCGA
CCTGACGGTGATAGGCGCCCGCGACGACCTCATGGTCAACAACGCCGGTTTGGTATGTG
GCGGAGTTCACACCGCCAACGCGACGGTGTACATGATCGATACGGTGCTGATGCCCCCG
GCACAGGAATTCTAAGCGGCCGCACTCGAGCACCACCACCACCACCACTGAGATCCGGCTGCT
AACAAAGCCCGAAAGGAAGCTGAGTTGGCTGCTGCCACCGCTGAGCAATAACTAGCATAACC
CCTTGGGGCCTCTAAACGGGTCTTGAGGGGTTTTTTGCTGAAAGGAGGAACTATATCCGGAT
Protein sequence - Rv2873- C2362 Ecoli-pET28[6xHis-CthermoCohesin (underlined)-
m.tbRv2873 (bold)]
(SEQ ID NO: 205)
MGSSHHHHHHSSGLVPRGSHMASMDLDAVRIKVDTVNAKPGDTVNIPVRFSGIPSKGIANCDFVYS
YDPNVLEIIEIKPGELIVDPNPTKSFDTAVYPDRKMIVFLFAEDSGTGAYAITKDGVFATIVAKVKEG
APNGLSVIKFVEVGGFANNDLVEQKTQFFDGGVNVGDTTEPATPTTPVTTPTTTDDLDAASKPVSQ
DTSPKPATSPAAPVTTAAMADPAADLIGRGCAQYAAQNPTGPGSVAGMAQDPVATAASNNP
MLSTLTSALSGKLNPDVNLVDTLNGGEYTVFAPTNAAFDKLPAATIDQLKTDAKLLSSILTYH
VIAGQASPSRIDGTHQTLQGADLTVIGARDDLMVNNAGLVCGGVHTANATVYMIDTVLMPP
AQEF
Rv0831 - C2356 Ecoli-pET28[6xHis-CthermoCohesin (underlined)-m.tbRv0831(bold)]
Additional modifications are in italics.
(SEQ ID NO: 206)
TGGCGAATGGGACGCGCCCTGTAGCGGCGCATTAAGCGCGGCGGGTGTGGTGGTTACGCGCAG
CGTGACCGCTACACTTGCCAGCGCCCTAGCGCCCGCTCCTTTCGCTTTCTTCCCTTCCTTTCTCG
CCACGTTCGCCGGCTTTCCCCGTCAAGCTCTAAATCGGGGGCTCCCTTTAGGGTTCCGATTTAG
TGCTTTACGGCACCTCGACCCCAAAAAACTTGATTAGGGTGATGGTTCACGTAGTGGGCCATC
GCCCTGATAGACGGTTTTTCGCCCTTTGACGTTGGAGTCCACGTTCTTTAATAGTGGACTCTTGT
TCCAAACTGGAACAACACTCAACCCTATCTCGGTCTATTCTTTTGATTTATAAGGGATTTTGCC
GATTTCGGCCTATTGGTTAAAAAATGAGCTGATTTAACAAAAATTTAACGCGAATTTTAACAA
AATATTAACGTTTACAATTTCAGGTGGCACTTTTCGGGGAAATGTGCGCGGAACCCCTATTTGT
TTATTTTTCTAAATACATTCAAATATGTATCCGCTCATGAATTAATTCTTAGAAAAACTCATCG
AGCATCAAATGAAACTGCAATTTATTCATATCAGGATTATCAATACCATATTTTTGAAAAAGCC
GTTTCTGTAATGAAGGAGAAAACTCACCGAGGCAGTTCCATAGGATGGCAAGATCCTGGTATC
GGTCTGCGATTCCGACTCGTCCAACATCAATACAACCTATTAATTTCCCCTCGTCAAAAATAAG
GTTATCAAGTGAGAAATCACCATGAGTGACGACTGAATCCGGTGAGAATGGCAAAAGTTTATG
CATTTCTTTCCAGACTTGTTCAACAGGCCAGCCATTACGCTCGTCATCAAAATCACTCGCATCA
ACCAAACCGTTATTCATTCGTGATTGCGCCTGAGCGAGACGAAATACGCGATCGCTGTTAAAA
GGACAATTACAAACAGGAATCGAATGCAACCGGCGCAGGAACACTGCCAGCGCATCAACAAT
ATTTTCACCTGAATCAGGATATTCTTCTAATACCTGGAATGCTGTTTTCCCGGGGATCGCAGTG
GTGAGTAACCATGCATCATCAGGAGTACGGATAAAATGCTTGATGGTCGGAAGAGGCATAAAT
TCCGTCAGCCAGTTTAGTCTGACCATCTCATCTGTAACATCATTGGCAACGCTACCTTTGCCAT
GTTTCAGAAACAACTCTGGCGCATCGGGCTTCCCATACAATCGATAGATTGTCGCACCTGATTG
CCCGACATTATCGCGAGCCCATTTATACCCATATAAATCAGCATCCATGTTGGAATTTAATCGC
GGCCTAGAGCAAGACGTTTCCCGTTGAATATGGCTCATAACACCCCTTGTATTACTGTTTATGT
AAGCAGACAGTTTTATTGTTCATGACCAAAATCCCTTAACGTGAGTTTTCGTTCCACTGAGCGT
CAGACCCCGTAGAAAAGATCAAAGGATCTTCTTGAGATCCTTTTTTTCTGCGCGTAATCTGCTG
CTTGCAAACAAAAAAACCACCGCTACCAGCGGTGGTTTGTTTGCCGGATCAAGAGCTACCAAC
TCTTTTTCCGAAGGTAACTGGCTTCAGCAGAGCGCAGATACCAAATACTGTCCTTCTAGTGTAG
CCGTAGTTAGGCCACCACTTCAAGAACTCTGTAGCACCGCCTACATACCTCGCTCTGCTAATCC
TGTTACCAGTGGCTGCTGCCAGTGGCGATAAGTCGTGTCTTACCGGGTTGGACTCAAGACGAT
AGTTACCGGATAAGGCGCAGCGGTCGGGCTGAACGGGGGGTTCGTGCACACAGCCCAGCTTG
GAGCGAACGACCTACACCGAACTGAGATACCTACAGCGTGAGCTATGAGAAAGCGCCACGCT
TCCCGAAGGGAGAAAGGCGGACAGGTATCCGGTAAGCGGCAGGGTCGGAACAGGAGAGCGC
ACGAGGGAGCTTCCAGGGGGAAACGCCTGGTATCTTTATAGTCCTGTCGGGTTTCGCCACCTCT
GACTTGAGCGTCGATTTTTGTGATGCTCGTCAGGGGGGCGGAGCCTATGGAAAAACGCCAGCA
ACGCGGCCTTTTTACGGTTCCTGGCCTTTTGCTGGCCTTTTGCTCACATGTTCTTTCCTGCGTTA
TCCCCTGATTCTGTGGATAACCGTATTACCGCCTTTGAGTGAGCTGATACCGCTCGCCGCAGCC
GAACGACCGAGCGCAGCGAGTCAGTGAGCGAGGAAGCGGAAGAGCGCCTGATGCGGTATTTT
CTCCTTACGCATCTGTGCGGTATTTCACACCGCATATATGGTGCACTCTCAGTACAATCTGCTC
TGATGCCGCATAGTTAAGCCAGTATACACTCCGCTATCGCTACGTGACTGGGTCATGGCTGCGC
CCCGACACCCGCCAACACCCGCTGACGCGCCCTGACGGGCTTGTCTGCTCCCGGCATCCGCTTA
CAGACAAGCTGTGACCGTCTCCGGGAGCTGCATGTGTCAGAGGTTTTCACCGTCATCACCGAA
ACGCGCGAGGCAGCTGCGGTAAAGCTCATCAGCGTGGTCGTGAAGCGATTCACAGATGTCTGC
CTGTTCATCCGCGTCCAGCTCGTTGAGTTTCTCCAGAAGCGTTAATGTCTGGCTTCTGATAAAG
CGGGCCATGTTAAGGGCGGTTTTTTCCTGTTTGGTCACTGATGCCTCCGTGTAAGGGGGATTTC
TGTTCATGGGGGTAATGATACCGATGAAACGAGAGAGGATGCTCACGATACGGGTTACTGATG
ATGAACATGCCCGGTTACTGGAACGTTGTGAGGGTAAACAACTGGCGGTATGGATGCGGCGGG
ACCAGAGAAAAATCACTCAGGGTCAATGCCAGCGCTTCGTTAATACAGATGTAGGTGTTCCAC
AGGGTAGCCAGCAGCATCCTGCGATGCAGATCCGGAACATAATGGTGCAGGGCGCTGACTTCC
GCGTTTCCAGACTTTACGAAACACGGAAACCGAAGACCATTCATGTTGTTGCTCAGGTCGCAG
ACGTTTTGCAGCAGCAGTCGCTTCACGTTCGCTCGCGTATCGGTGATTCATTCTGCTAACCAGT
AAGGCAACCCCGCCAGCCTAGCCGGGTCCTCAACGACAGGAGCACGATCATGCGCACCCGTG
GGGCCGCCATGCCGGCGATAATGGCCTGCTTCTCGCCGAAACGTTTGGTGGCGGGACCAGTGA
CGAAGGCTTGAGCGAGGGCGTGCAAGATTCCGAATACCGCAAGCGACAGGCCGATCATCGTC
GCGCTCCAGCGAAAGCGGTCCTCGCCGAAAATGACCCAGAGCGCTGCCGGCACCTGTCCTACG
AGTTGCATGATAAAGAAGACAGTCATAAGTGCGGCGACGATAGTCATGCCCCGCGCCCACCGG
AAGGAGCTGACTGGGTTGAAGGCTCTCAAGGGCATCGGTCGAGATCCCGGTGCCTAATGAGTG
AGCTAACTTACATTAATTGCGTTGCGCTCACTGCCCGCTTTCCAGTCGGGAAACCTGTCGTGCC
AGCTGCATTAATGAATCGGCCAACGCGCGGGGAGAGGCGGTTTGCGTATTGGGCGCCAGGGTG
GTTTTTCTTTTCACCAGTGAGACGGGCAACAGCTGATTGCCCTTCACCGCCTGGCCCTGAGAGA
GTTGCAGCAAGCGGTCCACGCTGGTTTGCCCCAGCAGGCGAAAATCCTGTTTGATGGTGGTTA
ACGGCGGGATATAACATGAGCTGTCTTCGGTATCGTCGTATCCCACTACCGAGATATCCGCAC
CAACGCGCAGCCCGGACTCGGTAATGGCGCGCATTGCGCCCAGCGCCATCTGATCGTTGGCAA
CCAGCATCGCAGTGGGAACGATGCCCTCATTCAGCATTTGCATGGTTTGTTGAAAACCGGACA
TGGCACTCCAGTCGCCTTCCCGTTCCGCTATCGGCTGAATTTGATTGCGAGTGAGATATTTATG
CCAGCCAGCCAGACGCAGACGCGCCGAGACAGAACTTAATGGGCCCGCTAACAGCGCGATTT
GCTGGTGACCCAATGCGACCAGATGCTCCACGCCCAGTCGCGTACCGTCTTCATGGGAGAAAA
TAATACTGTTGATGGGTGTCTGGTCAGAGACATCAAGAAATAACGCCGGAACATTAGTGCAGG
CAGCTTCCACAGCAATGGCATCCTGGTCATCCAGCGGATAGTTAATGATCAGCCCACTGACGC
GTTGCGCGAGAAGATTGTGCACCGCCGCTTTACAGGCTTCGACGCCGCTTCGTTCTACCATCGA
CACCACCACGCTGGCACCCAGTTGATCGGCGCGAGATTTAATCGCCGCGACAATTTGCGACGG
CGCGTGCAGGGCCAGACTGGAGGTGGCAACGCCAATCAGCAACGACTGTTTGCCCGCCAGTTG
TTGTGCCACGCGGTTGGGAATGTAATTCAGCTCCGCCATCGCCGCTTCCACTTTTTCCCGCGTTT
TCGCAGAAACGTGGCTGGCCTGGTTCACCACGCGGGAAACGGTCTGATAAGAGACACCGGCAT
ACTCTGCGACATCGTATAACGTTACTGGTTTCACATTCACCACCCTGAATTGACTCTCTTCCGG
GCGCTATCATGCCATACCGCGAAAGGTTTTGCGCCATTCGATGGTGTCCGGGATCTCGACGCTC
TCCCTTATGCGACTCCTGCATTAGGAAGCAGCCCAGTAGTAGGTTGAGGCCGTTGAGCACCGC
CGCCGCAAGGAATGGTGCATGCAAGGAGATGGCGCCCAACAGTCCCCCGGCCACGGGGCCTG
CCACCATACCCACGCCGAAACAAGCGCTCATGAGCCCGAAGTGGCGAGCCCGATCTTCCCCAT
CGGTGATGTCGGCGATATAGGCGCCAGCAACCGCACCTGTGGCGCCGGTGATGCCGGCCACGA
TGCGTCCGGCGTAGAGGATCGAGATCTCGATCCCGCGAAATTAATACGACTCACTATAGGGGA
ATTGTGAGCGGATAACAATTCCCCTCTAGAAATAATTTTGTTTAACTTTAAGAAGGAGATATAC
CATGGGCAGCAGCCATCATCATCATCATCACAGCAGCGGCCTGGTGCCGCGCGGCAGCCATAT
GGCTAGTATGGATCTGGATGCAGTAAGGATTAAAGTGGACACAGTAAATGCAAAACCGGGAG
ACACAGTAAATATACCTGTAAGATTCAGTGGTATACCATCCAAGGGAATAGCAAACTGTGACT
TTGTATACAGCTATGACCCGAATGTACTTGAGATAATAGAGATAAAACCGGGAGAATTGATAG
TTGACCCGAATCCTACCAAGAGCTTTGATACTGCAGTATATCCTGACAGAAAGATGATAGTAT
TCCTGTTTGCGGAAGACAGCGGAACAGGAGCGTATGCAATAACTAAAGACGGAGTATTTGCTA
CGATAGTAGCGAAAGTAAAAGAAGGAGCACCTAACGGGCTCAGTGTAATCAAATTTGTAGAA
GTAGGCGGATTTGCGAACAATGACCTTGTAGAACAGAAGACACAGTTCTTTGACGGTGGAGTA
AATGTTGGAGATACAACAGAACCTGCAACACCTACAACACCTGTAACAACACCGACAACAAC
AGATGATCTAGATGCAGCTAGC [symbol] AGCCCAACGC
ACCCGTTGCCCTGGTGACGGTGGAAATCCGTCACCCGACAACGGATTCGCTCACCGAAT
CAGCGAACCGGGAGCTCAAACACCTGCTTATCAATGATCTACCGATCGAACGCCAGGCG
CAGGACGTCAGCTGGGGGATGACGGCGCCCGGTGGAGCCCCCACCCCGGTCGCGGATC
GTTTCGTTCGTTATGTCAATCGCGATAACACCACCGCCGCTTCACTGAAGAACCAGGCGA
TAGTCGTGGAGACCACCGCCTACCGCAGCTTTGAGGCCTTTACCGACGTTGTGATGCGG
GTCGTGGATGCTCGCGCGCAGGTCTCGTCAATCGTTGGGTTGGAGCGTATCGGTCTTCG
CTTTGTTCTGGAGATCCGCGTCCCCGCGGGTGTCGACGGCCGGATCACGTGGAGCAACT
GGATCGACGAGCAGCTGCTCGGGCCGCAGCGTTTCACTCCCGGCGGCCTGGTCCTGACC
GAGTGGCAGGGTGCCGCAGTCTACCGTGAGCTACAACCAGGCAAATCGCTCATCGTGCG
CTACGGCCCGGGTATGGGCCAAGCGCTTGATCCCAATTACCATCTGCGCCGAATAACAC
CCGCCCAAACCGGACCATTCTTCCTGCTGGACATCGATAGCTTTTGGACTCCCAGTGGCG
GCTCCATTCCCGAGTACAACAGGGACGCCTTAGTGTCGACATTCCAGGACCTGTACGGTC
CGGCCCAGGTCGTGTTTCAGGAGATGAT [symbol]
GAATTCTAAGCGGCCGCACTCGAGCACCACCACCACCACCACTGAGATCCGGCTGCTAACAAAG
CCCGAAAGGAAGCTGAGTTGGCTGCTGCCACCGCTGAGCAATAACTAGCATAACCCCTTGGGG
CCTCTAAACGGGTCTTGAGGGGTTTTTTGCTGAAAGGAGGAACTATATCCGGAT
Protein sequence - Rv0831-C2356 Ecoli-pET28[6xHis-CthermoCohesin (underlined)-
m.tbRv0831(bold)]
(SEQ ID NO: 207)
MGSSHHHHHHSSGLVPRGSHMASMDLDAVRIKVDTVNAKPGDTVNIPVRFSGIPSKGIANCDFVYS
YDPNVLEIIEIKPGELIVDPNPTKSFDTAVYPDRKMIVFLFAEDSGTGAYAITKDGVFATIVAKVKEG
APNGLSVIKFVEVGGFANNDLVEQKTQFFDGGVNVGDTTEPATPTTPVTTPTTTDDLDAASMLPE
TNQDEVQPNAPVALVTVEIRHPTTDSLTESANRELKHLLINDLPIERQAQDVSWGMTAPGGAP
TPVADRFVRYVNRDNTTAASLKNQAIVVETTAYRSFEAFTDVVMRVVDARAQVSSIVGLERIG
LRFVLEIRVPAGVDGRITWSNWIDEQLLGPQRFTPGGLVLTEWQGAAVYRELQPGKSLIVRY
GPGMGQALDPNYHLRRITPAQTGPFFLLDIDSFWTPSGGSIPEYNRDALVSTFQDLYGPAQVV
FQEMITSRLKDELLRQ
Rv0632 - C2355 Ecoli-pET28[6xHis-CthermoCohesin (underlined) -m.tbRv0632 (bold)]
Additional modifications are in italics.
(SEQ ID NO: 208)
TGGCGAATGGGACGCGCCCTGTAGCGGCGCATTAAGCGCGGCGGGTGTGGTGGTTACGCGCAG
CGTGACCGCTACACTTGCCAGCGCCCTAGCGCCCGCTCCTTTCGCTTTCTTCCCTTCCTTTCTCG
CCACGTTCGCCGGCTTTCCCCGTCAAGCTCTAAATCGGGGGCTCCCTTTAGGGTTCCGATTTAG
TGCTTTACGGCACCTCGACCCCAAAAAACTTGATTAGGGTGATGGTTCACGTAGTGGGCCATC
GCCCTGATAGACGGTTTTTCGCCCTTTGACGTTGGAGTCCACGTTCTTTAATAGTGGACTCTTGT
TCCAAACTGGAACAACACTCAACCCTATCTCGGTCTATTCTTTTGATTTATAAGGGATTTTGCC
GATTTCGGCCTATTGGTTAAAAAATGAGCTGATTTAACAAAAATTTAACGCGAATTTTAACAA
AATATTAACGTTTACAATTTCAGGTGGCACTTTTCGGGGAAATGTGCGCGGAACCCCTATTTGT
TTATTTTTCTAAATACATTCAAATATGTATCCGCTCATGAATTAATTCTTAGAAAAACTCATCG
AGCATCAAATGAAACTGCAATTTATTCATATCAGGATTATCAATACCATATTTTTGAAAAAGCC
GTTTCTGTAATGAAGGAGAAAACTCACCGAGGCAGTTCCATAGGATGGCAAGATCCTGGTATC
GGTCTGCGATTCCGACTCGTCCAACATCAATACAACCTATTAATTTCCCCTCGTCAAAAATAAG
GTTATCAAGTGAGAAATCACCATGAGTGACGACTGAATCCGGTGAGAATGGCAAAAGTTTATG
CATTTCTTTCCAGACTTGTTCAACAGGCCAGCCATTACGCTCGTCATCAAAATCACTCGCATCA
ACCAAACCGTTATTCATTCGTGATTGCGCCTGAGCGAGACGAAATACGCGATCGCTGTTAAAA
GGACAATTACAAACAGGAATCGAATGCAACCGGCGCAGGAACACTGCCAGCGCATCAACAAT
ATTTTCACCTGAATCAGGATATTCTTCTAATACCTGGAATGCTGTTTTCCCGGGGATCGCAGTG
GTGAGTAACCATGCATCATCAGGAGTACGGATAAAATGCTTGATGGTCGGAAGAGGCATAAAT
TCCGTCAGCCAGTTTAGTCTGACCATCTCATCTGTAACATCATTGGCAACGCTACCTTTGCCAT
GTTTCAGAAACAACTCTGGCGCATCGGGCTTCCCATACAATCGATAGATTGTCGCACCTGATTG
CCCGACATTATCGCGAGCCCATTTATACCCATATAAATCAGCATCCATGTTGGAATTTAATCGC
GGCCTAGAGCAAGACGTTTCCCGTTGAATATGGCTCATAACACCCCTTGTATTACTGTTTATGT
AAGCAGACAGTTTTATTGTTCATGACCAAAATCCCTTAACGTGAGTTTTCGTTCCACTGAGCGT
CAGACCCCGTAGAAAAGATCAAAGGATCTTCTTGAGATCCTTTTTTTCTGCGCGTAATCTGCTG
CTTGCAAACAAAAAAACCACCGCTACCAGCGGTGGTTTGTTTGCCGGATCAAGAGCTACCAAC
TCTTTTTCCGAAGGTAACTGGCTTCAGCAGAGCGCAGATACCAAATACTGTCCTTCTAGTGTAG
CCGTAGTTAGGCCACCACTTCAAGAACTCTGTAGCACCGCCTACATACCTCGCTCTGCTAATCC
TGTTACCAGTGGCTGCTGCCAGTGGCGATAAGTCGTGTCTTACCGGGTTGGACTCAAGACGAT
AGTTACCGGATAAGGCGCAGCGGTCGGGCTGAACGGGGGGTTCGTGCACACAGCCCAGCTTG
GAGCGAACGACCTACACCGAACTGAGATACCTACAGCGTGAGCTATGAGAAAGCGCCACGCT
TCCCGAAGGGAGAAAGGCGGACAGGTATCCGGTAAGCGGCAGGGTCGGAACAGGAGAGCGC
ACGAGGGAGCTTCCAGGGGGAAACGCCTGGTATCTTTATAGTCCTGTCGGGTTTCGCCACCTCT
GACTTGAGCGTCGATTTTTGTGATGCTCGTCAGGGGGGCGGAGCCTATGGAAAAACGCCAGCA
ACGCGGCCTTTTTACGGTTCCTGGCCTTTTGCTGGCCTTTTGCTCACATGTTCTTTCCTGCGTTA
TCCCCTGATTCTGTGGATAACCGTATTACCGCCTTTGAGTGAGCTGATACCGCTCGCCGCAGCC
GAACGACCGAGCGCAGCGAGTCAGTGAGCGAGGAAGCGGAAGAGCGCCTGATGCGGTATTTT
CTCCTTACGCATCTGTGCGGTATTTCACACCGCATATATGGTGCACTCTCAGTACAATCTGCTC
TGATGCCGCATAGTTAAGCCAGTATACACTCCGCTATCGCTACGTGACTGGGTCATGGCTGCGC
CCCGACACCCGCCAACACCCGCTGACGCGCCCTGACGGGCTTGTCTGCTCCCGGCATCCGCTTA
CAGACAAGCTGTGACCGTCTCCGGGAGCTGCATGTGTCAGAGGTTTTCACCGTCATCACCGAA
ACGCGCGAGGCAGCTGCGGTAAAGCTCATCAGCGTGGTCGTGAAGCGATTCACAGATGTCTGC
CTGTTCATCCGCGTCCAGCTCGTTGAGTTTCTCCAGAAGCGTTAATGTCTGGCTTCTGATAAAG
CGGGCCATGTTAAGGGCGGTTTTTTCCTGTTTGGTCACTGATGCCTCCGTGTAAGGGGGATTTC
TGTTCATGGGGGTAATGATACCGATGAAACGAGAGAGGATGCTCACGATACGGGTTACTGATG
ATGAACATGCCCGGTTACTGGAACGTTGTGAGGGTAAACAACTGGCGGTATGGATGCGGCGGG
ACCAGAGAAAAATCACTCAGGGTCAATGCCAGCGCTTCGTTAATACAGATGTAGGTGTTCCAC
AGGGTAGCCAGCAGCATCCTGCGATGCAGATCCGGAACATAATGGTGCAGGGCGCTGACTTCC
GCGTTTCCAGACTTTACGAAACACGGAAACCGAAGACCATTCATGTTGTTGCTCAGGTCGCAG
ACGTTTTGCAGCAGCAGTCGCTTCACGTTCGCTCGCGTATCGGTGATTCATTCTGCTAACCAGT
AAGGCAACCCCGCCAGCCTAGCCGGGTCCTCAACGACAGGAGCACGATCATGCGCACCCGTG
GGGCCGCCATGCCGGCGATAATGGCCTGCTTCTCGCCGAAACGTTTGGTGGCGGGACCAGTGA
CGAAGGCTTGAGCGAGGGCGTGCAAGATTCCGAATACCGCAAGCGACAGGCCGATCATCGTC
GCGCTCCAGCGAAAGCGGTCCTCGCCGAAAATGACCCAGAGCGCTGCCGGCACCTGTCCTACG
AGTTGCATGATAAAGAAGACAGTCATAAGTGCGGCGACGATAGTCATGCCCCGCGCCCACCGG
AAGGAGCTGACTGGGTTGAAGGCTCTCAAGGGCATCGGTCGAGATCCCGGTGCCTAATGAGTG
AGCTAACTTACATTAATTGCGTTGCGCTCACTGCCCGCTTTCCAGTCGGGAAACCTGTCGTGCC
AGCTGCATTAATGAATCGGCCAACGCGCGGGGAGAGGCGGTTTGCGTATTGGGCGCCAGGGTG
GTTTTTCTTTTCACCAGTGAGACGGGCAACAGCTGATTGCCCTTCACCGCCTGGCCCTGAGAGA
GTTGCAGCAAGCGGTCCACGCTGGTTTGCCCCAGCAGGCGAAAATCCTGTTTGATGGTGGTTA
ACGGCGGGATATAACATGAGCTGTCTTCGGTATCGTCGTATCCCACTACCGAGATATCCGCAC
CAACGCGCAGCCCGGACTCGGTAATGGCGCGCATTGCGCCCAGCGCCATCTGATCGTTGGCAA
CCAGCATCGCAGTGGGAACGATGCCCTCATTCAGCATTTGCATGGTTTGTTGAAAACCGGACA
TGGCACTCCAGTCGCCTTCCCGTTCCGCTATCGGCTGAATTTGATTGCGAGTGAGATATTTATG
CCAGCCAGCCAGACGCAGACGCGCCGAGACAGAACTTAATGGGCCCGCTAACAGCGCGATTT
GCTGGTGACCCAATGCGACCAGATGCTCCACGCCCAGTCGCGTACCGTCTTCATGGGAGAAAA
TAATACTGTTGATGGGTGTCTGGTCAGAGACATCAAGAAATAACGCCGGAACATTAGTGCAGG
CAGCTTCCACAGCAATGGCATCCTGGTCATCCAGCGGATAGTTAATGATCAGCCCACTGACGC
GTTGCGCGAGAAGATTGTGCACCGCCGCTTTACAGGCTTCGACGCCGCTTCGTTCTACCATCGA
CACCACCACGCTGGCACCCAGTTGATCGGCGCGAGATTTAATCGCCGCGACAATTTGCGACGG
CGCGTGCAGGGCCAGACTGGAGGTGGCAACGCCAATCAGCAACGACTGTTTGCCCGCCAGTTG
TTGTGCCACGCGGTTGGGAATGTAATTCAGCTCCGCCATCGCCGCTTCCACTTTTTCCCGCGTTT
TCGCAGAAACGTGGCTGGCCTGGTTCACCACGCGGGAAACGGTCTGATAAGAGACACCGGCAT
ACTCTGCGACATCGTATAACGTTACTGGTTTCACATTCACCACCCTGAATTGACTCTCTTCCGG
GCGCTATCATGCCATACCGCGAAAGGTTTTGCGCCATTCGATGGTGTCCGGGATCTCGACGCTC
TCCCTTATGCGACTCCTGCATTAGGAAGCAGCCCAGTAGTAGGTTGAGGCCGTTGAGCACCGC
CGCCGCAAGGAATGGTGCATGCAAGGAGATGGCGCCCAACAGTCCCCCGGCCACGGGGCCTG
CCACCATACCCACGCCGAAACAAGCGCTCATGAGCCCGAAGTGGCGAGCCCGATCTTCCCCAT
CGGTGATGTCGGCGATATAGGCGCCAGCAACCGCACCTGTGGCGCCGGTGATGCCGGCCACGA
TGCGTCCGGCGTAGAGGATCGAGATCTCGATCCCGCGAAATTAATACGACTCACTATAGGGGA
ATTGTGAGCGGATAACAATTCCCCTCTAGAAATAATTTTGTTTAACTTTAAGAAGGAGATATAC
CATGGGCAGCAGCCATCATCATCATCATCACAGCAGCGGCCTGGTGCCGCGCGGCAGCCATAT
GGCTAGTATGGATCTGGATGCAGTAAGGATTAAAGTGGACACAGTAAATGCAAAACCGGGAG
ACACAGTAAATATACCTGTAAGATTCAGTGGTATACCATCCAAGGGAATAGCAAACTGTGACT
TTGTATACAGCTATGACCCGAATGTACTTGAGATAATAGAGATAAAACCGGGAGAATTGATAG
TTGACCCGAATCCTACCAAGAGCTTTGATACTGCAGTATATCCTGACAGAAAGATGATAGTAT
TCCTGTTTGCGGAAGACAGCGGAACAGGAGCGTATGCAATAACTAAAGACGGAGTATTTGCTA
CGATAGTAGCGAAAGTAAAAGAAGGAGCACCTAACGGGCTCAGTGTAATCAAATTTGTAGAA
GTAGGCGGATTTGCGAACAATGACCTTGTAGAACAGAAGACACAGTTCTTTGACGGTGGAGTA
AATGTTGGAGATACAACAGAACCTGCAACACCTACAACACCTGTAACAACACCGACAACAAC
AGATGATCTAGATGCAGCTAGCATGAGCGACCCGGTCAGCTATACCCGCAAGGATTCCATC
GCCGTCATCAGTATGGACGACGGCAAGGTCAACGCACTGGGCCCGGCGATGCAACAAGC
CCTCAATGCAGCGATCGACAACGCGGACCGTGATGATGTTGGGGCGCTGGTGATCACCG
GTAATGGCCGGGTATTCAGCGGAGGCTTCGACCTGAAGATCCTCACCTCCGGTGAAGTG
CAGCCCGCGATCGACATGCTCAGGGGCGGCTTCGAGCTGGCGTATCGCCTCTTGTCCTA
CCCCAAACCGGTGGTGATGGCGTGCACCGGTCACGCCATCGCCATGGGCGCGTTTCTGT
TGTCCTGCGGCGATCATCGGGTGGCGGCCCACGCATACAACATCCAGGCCAATGAGGTC
GCGATCGGCATGACCATTCCGTACGCGGCGTTAGAGATCATGAAGCTGCGACTGACCCG
GTCGGCATACCAGCAGGCAACCGGGCTGGCCAAGACGTTCTTCGGGGAAACCGCGCTGG
CCGCCGGGTTTATCGACGAGATCGCCCTGCCGGAGGTGGTGGTCAGCCGCGCCGAGGAA
GCCGCACGAGAGTTCGCCGGTCTCAACCAACACGCCCATGCCGCGACCAAGTTGCGCTC
CCGCGCCGACGCGCTCACTGCGATTCGGGCCGGGATCGACGGGATAGCAGCCGAGTTCG
GGCTGGAATTCTAAGCGGCCGCACTCGAGCACCACCACCACCACCACTGAGATCCGGCTGCTA
ACAAAGCCCGAAAGGAAGCTGAGTTGGCTGCTGCCACCGCTGAGCAATAACTAGCATAACCCC
TTGGGGCCTCTAAACGGGTCTTGAGGGGTTTTTTGCTGAAAGGAGGAACTATATCCGGAT
Protein sequence-Rv0632 - C2355 Ecoli-pET28[6xHis-CthermoCohesin (underlined) -
m.tbRv0632 (bold)]
(SEQ ID NO: 209)
MGSSHHHHHHSSGLVPRGSHMASMDLDAVRIKVDTVNAKPGDTVNIPVRFSGIPSKGIANCDFVYS
YDPNVLEIIEIKPGELIVDPNPTKSFDTAVYPDRKMIVFLFAEDSGTGAYAITKDGVFATIVAKVKEG
APNGLSVIKFVEVGGFANNDLVEQKTQFFDGGVNVGDTTEPATPTTPVTTPTTTDDLDAASMSDP
VSYTRKDSIAVISMDDGKVNALGPAMQQALNAAIDNADRDDVGALVITGNGRVFSGGFDLKI
LTSGEVQPAIDMLRGGFELAYRLLSYPKPVVMACTGHAIAMGAFLLSCGDHRVAAHAYNIQA
NEVAIGMTIPYAALEIMKLRLTRSAYQQATGLAKTFFGETALAAGFIDEIALPEVVVSRAEEA
AREFAGLNQHAHAATKLRSRADALTAIRAGIDGIAAEFGLEF
Ag85C - C2391 Ecoli-pET28[6xHis-CthermoCohesin (underlined)-m.tbAg85C (bold)]
Additional modifications are in italics.
(SEQ ID NO: 210)
TGGCGAATGGGACGCGCCCTGTAGCGGCGCATTAAGCGCGGCGGGTGTGGTGGTTACGCGCAG
CGTGACCGCTACACTTGCCAGCGCCCTAGCGCCCGCTCCTTTCGCTTTCTTCCCTTCCTTTCTCG
CCACGTTCGCCGGCTTTCCCCGTCAAGCTCTAAATCGGGGGCTCCCTTTAGGGTTCCGATTTAG
TGCTTTACGGCACCTCGACCCCAAAAAACTTGATTAGGGTGATGGTTCACGTAGTGGGCCATC
GCCCTGATAGACGGTTTTTCGCCCTTTGACGTTGGAGTCCACGTTCTTTAATAGTGGACTCTTGT
TCCAAACTGGAACAACACTCAACCCTATCTCGGTCTATTCTTTTGATTTATAAGGGATTTTGCC
GATTTCGGCCTATTGGTTAAAAAATGAGCTGATTTAACAAAAATTTAACGCGAATTTTAACAA
AATATTAACGTTTACAATTTCAGGTGGCACTTTTCGGGGAAATGTGCGCGGAACCCCTATTTGT
TTATTTTTCTAAATACATTCAAATATGTATCCGCTCATGAATTAATTCTTAGAAAAACTCATCG
AGCATCAAATGAAACTGCAATTTATTCATATCAGGATTATCAATACCATATTTTTGAAAAAGCC
GTTTCTGTAATGAAGGAGAAAACTCACCGAGGCAGTTCCATAGGATGGCAAGATCCTGGTATC
GGTCTGCGATTCCGACTCGTCCAACATCAATACAACCTATTAATTTCCCCTCGTCAAAAATAAG
GTTATCAAGTGAGAAATCACCATGAGTGACGACTGAATCCGGTGAGAATGGCAAAAGTTTATG
CATTTCTTTCCAGACTTGTTCAACAGGCCAGCCATTACGCTCGTCATCAAAATCACTCGCATCA
ACCAAACCGTTATTCATTCGTGATTGCGCCTGAGCGAGACGAAATACGCGATCGCTGTTAAAA
GGACAATTACAAACAGGAATCGAATGCAACCGGCGCAGGAACACTGCCAGCGCATCAACAAT
ATTTTCACCTGAATCAGGATATTCTTCTAATACCTGGAATGCTGTTTTCCCGGGGATCGCAGTG
GTGAGTAACCATGCATCATCAGGAGTACGGATAAAATGCTTGATGGTCGGAAGAGGCATAAAT
TCCGTCAGCCAGTTTAGTCTGACCATCTCATCTGTAACATCATTGGCAACGCTACCTTTGCCAT
GTTTCAGAAACAACTCTGGCGCATCGGGCTTCCCATACAATCGATAGATTGTCGCACCTGATTG
CCCGACATTATCGCGAGCCCATTTATACCCATATAAATCAGCATCCATGTTGGAATTTAATCGC
GGCCTAGAGCAAGACGTTTCCCGTTGAATATGGCTCATAACACCCCTTGTATTACTGTTTATGT
AAGCAGACAGTTTTATTGTTCATGACCAAAATCCCTTAACGTGAGTTTTCGTTCCACTGAGCGT
CAGACCCCGTAGAAAAGATCAAAGGATCTTCTTGAGATCCTTTTTTTCTGCGCGTAATCTGCTG
CTTGCAAACAAAAAAACCACCGCTACCAGCGGTGGTTTGTTTGCCGGATCAAGAGCTACCAAC
TCTTTTTCCGAAGGTAACTGGCTTCAGCAGAGCGCAGATACCAAATACTGTCCTTCTAGTGTAG
CCGTAGTTAGGCCACCACTTCAAGAACTCTGTAGCACCGCCTACATACCTCGCTCTGCTAATCC
TGTTACCAGTGGCTGCTGCCAGTGGCGATAAGTCGTGTCTTACCGGGTTGGACTCAAGACGAT
AGTTACCGGATAAGGCGCAGCGGTCGGGCTGAACGGGGGGTTCGTGCACACAGCCCAGCTTG
GAGCGAACGACCTACACCGAACTGAGATACCTACAGCGTGAGCTATGAGAAAGCGCCACGCT
TCCCGAAGGGAGAAAGGCGGACAGGTATCCGGTAAGCGGCAGGGTCGGAACAGGAGAGCGC
ACGAGGGAGCTTCCAGGGGGAAACGCCTGGTATCTTTATAGTCCTGTCGGGTTTCGCCACCTCT
GACTTGAGCGTCGATTTTTGTGATGCTCGTCAGGGGGGCGGAGCCTATGGAAAAACGCCAGCA
ACGCGGCCTTTTTACGGTTCCTGGCCTTTTGCTGGCCTTTTGCTCACATGTTCTTTCCTGCGTTA
TCCCCTGATTCTGTGGATAACCGTATTACCGCCTTTGAGTGAGCTGATACCGCTCGCCGCAGCC
GAACGACCGAGCGCAGCGAGTCAGTGAGCGAGGAAGCGGAAGAGCGCCTGATGCGGTATTTT
CTCCTTACGCATCTGTGCGGTATTTCACACCGCATATATGGTGCACTCTCAGTACAATCTGCTC
TGATGCCGCATAGTTAAGCCAGTATACACTCCGCTATCGCTACGTGACTGGGTCATGGCTGCGC
CCCGACACCCGCCAACACCCGCTGACGCGCCCTGACGGGCTTGTCTGCTCCCGGCATCCGCTTA
CAGACAAGCTGTGACCGTCTCCGGGAGCTGCATGTGTCAGAGGTTTTCACCGTCATCACCGAA
ACGCGCGAGGCAGCTGCGGTAAAGCTCATCAGCGTGGTCGTGAAGCGATTCACAGATGTCTGC
CTGTTCATCCGCGTCCAGCTCGTTGAGTTTCTCCAGAAGCGTTAATGTCTGGCTTCTGATAAAG
CGGGCCATGTTAAGGGCGGTTTTTTCCTGTTTGGTCACTGATGCCTCCGTGTAAGGGGGATTTC
TGTTCATGGGGGTAATGATACCGATGAAACGAGAGAGGATGCTCACGATACGGGTTACTGATG
ATGAACATGCCCGGTTACTGGAACGTTGTGAGGGTAAACAACTGGCGGTATGGATGCGGCGGG
ACCAGAGAAAAATCACTCAGGGTCAATGCCAGCGCTTCGTTAATACAGATGTAGGTGTTCCAC
AGGGTAGCCAGCAGCATCCTGCGATGCAGATCCGGAACATAATGGTGCAGGGCGCTGACTTCC
GCGTTTCCAGACTTTACGAAACACGGAAACCGAAGACCATTCATGTTGTTGCTCAGGTCGCAG
ACGTTTTGCAGCAGCAGTCGCTTCACGTTCGCTCGCGTATCGGTGATTCATTCTGCTAACCAGT
AAGGCAACCCCGCCAGCCTAGCCGGGTCCTCAACGACAGGAGCACGATCATGCGCACCCGTG
GGGCCGCCATGCCGGCGATAATGGCCTGCTTCTCGCCGAAACGTTTGGTGGCGGGACCAGTGA
CGAAGGCTTGAGCGAGGGCGTGCAAGATTCCGAATACCGCAAGCGACAGGCCGATCATCGTC
GCGCTCCAGCGAAAGCGGTCCTCGCCGAAAATGACCCAGAGCGCTGCCGGCACCTGTCCTACG
AGTTGCATGATAAAGAAGACAGTCATAAGTGCGGCGACGATAGTCATGCCCCGCGCCCACCGG
AAGGAGCTGACTGGGTTGAAGGCTCTCAAGGGCATCGGTCGAGATCCCGGTGCCTAATGAGTG
AGCTAACTTACATTAATTGCGTTGCGCTCACTGCCCGCTTTCCAGTCGGGAAACCTGTCGTGCC
AGCTGCATTAATGAATCGGCCAACGCGCGGGGAGAGGCGGTTTGCGTATTGGGCGCCAGGGTG
GTTTTTCTTTTCACCAGTGAGACGGGCAACAGCTGATTGCCCTTCACCGCCTGGCCCTGAGAGA
GTTGCAGCAAGCGGTCCACGCTGGTTTGCCCCAGCAGGCGAAAATCCTGTTTGATGGTGGTTA
ACGGCGGGATATAACATGAGCTGTCTTCGGTATCGTCGTATCCCACTACCGAGATATCCGCAC
CAACGCGCAGCCCGGACTCGGTAATGGCGCGCATTGCGCCCAGCGCCATCTGATCGTTGGCAA
CCAGCATCGCAGTGGGAACGATGCCCTCATTCAGCATTTGCATGGTTTGTTGAAAACCGGACA
TGGCACTCCAGTCGCCTTCCCGTTCCGCTATCGGCTGAATTTGATTGCGAGTGAGATATTTATG
CCAGCCAGCCAGACGCAGACGCGCCGAGACAGAACTTAATGGGCCCGCTAACAGCGCGATTT
GCTGGTGACCCAATGCGACCAGATGCTCCACGCCCAGTCGCGTACCGTCTTCATGGGAGAAAA
TAATACTGTTGATGGGTGTCTGGTCAGAGACATCAAGAAATAACGCCGGAACATTAGTGCAGG
CAGCTTCCACAGCAATGGCATCCTGGTCATCCAGCGGATAGTTAATGATCAGCCCACTGACGC
GTTGCGCGAGAAGATTGTGCACCGCCGCTTTACAGGCTTCGACGCCGCTTCGTTCTACCATCGA
CACCACCACGCTGGCACCCAGTTGATCGGCGCGAGATTTAATCGCCGCGACAATTTGCGACGG
CGCGTGCAGGGCCAGACTGGAGGTGGCAACGCCAATCAGCAACGACTGTTTGCCCGCCAGTTG
TTGTGCCACGCGGTTGGGAATGTAATTCAGCTCCGCCATCGCCGCTTCCACTTTTTCCCGCGTTT
TCGCAGAAACGTGGCTGGCCTGGTTCACCACGCGGGAAACGGTCTGATAAGAGACACCGGCAT
ACTCTGCGACATCGTATAACGTTACTGGTTTCACATTCACCACCCTGAATTGACTCTCTTCCGG
GCGCTATCATGCCATACCGCGAAAGGTTTTGCGCCATTCGATGGTGTCCGGGATCTCGACGCTC
TCCCTTATGCGACTCCTGCATTAGGAAGCAGCCCAGTAGTAGGTTGAGGCCGTTGAGCACCGC
CGCCGCAAGGAATGGTGCATGCAAGGAGATGGCGCCCAACAGTCCCCCGGCCACGGGGCCTG
CCACCATACCCACGCCGAAACAAGCGCTCATGAGCCCGAAGTGGCGAGCCCGATCTTCCCCAT
CGGTGATGTCGGCGATATAGGCGCCAGCAACCGCACCTGTGGCGCCGGTGATGCCGGCCACGA
TGCGTCCGGCGTAGAGGATCGAGATCTCGATCCCGCGAAATTAATACGACTCACTATAGGGGA
ATTGTGAGCGGATAACAATTCCCCTCTAGAAATAATTTTGTTTAACTTTAAGAAGGAGATATAC
CATGGGCAGCAGCCATCATCATCATCATCACAGCAGCGGCCTGGTGCCGCGCGGCAGCCATAT
GGCTAGTATGGATCTGGATGCAGTAAGGATTAAAGTGGACACAGTAAATGCAAAACCGGGAG
ACACAGTAAATATACCTGTAAGATTCAGTGGTATACCATCCAAGGGAATAGCAAACTGTGACT
TTGTATACAGCTATGACCCGAATGTACTTGAGATAATAGAGATAAAACCGGGAGAATTGATAG
TTGACCCGAATCCTACCAAGAGCTTTGATACTGCAGTATATCCTGACAGAAAGATGATAGTAT
TCCTGTTTGCGGAAGACAGCGGAACAGGAGCGTATGCAATAACTAAAGACGGAGTATTTGCTA
CGATAGTAGCGAAAGTAAAAGAAGGAGCACCTAACGGGCTCAGTGTAATCAAATTTGTAGAA
GTAGGCGGATTTGCGAACAATGACCTTGTAGAACAGAAGACACAGTTCTTTGACGGTGGAGTA
AATGTTGGAGATACAACAGAACCTGCAACACCTACAACACCTGTAACAACACCGACAACAAC
AGATGATCTAGATGCAGCTAGCTGCAGCTGT [symbol] [symbol]
CGCAGCGACAACCCTGCCGCGCCGGCTGGCTATCGCGGCTATGGGGGCTGTCCTGGT
TTACGGTCTGGTCGGTACCTTCGGCGGGCCGGCCACCGCGGGCGCATTCTCTAGGCCCG
GTCTTCCAGTGGAATATCTGCAGGTGCCATCCGCGTCGATGGGCCGCGACATCAAGGTC
CAGTTCCAGGGCGGCGGACCGCACGCGGTCTACCTGCTCGACGGTCTGCGGGCCCAGGA
TGACTACAACGGCTGGGACATCAACACCCCGGCCTTCGAGGAGTACTACCAGTCAGGGT
TGTCGGTGATCATGCCCGTGGGCGGCCAATCCAGTTTCTACACCGACTGGTATCAGCCCT
CGCAGAGCAACGGCCAGAACTACACCTACAAGTGGGAGACCTTCCTTACCAGAGAGATG
CCCGCCTGGCTACAGGCCAACAAGGGCGTGTCCCCGACAGGCAACGCGGCGGTGGGTCT
TTCGATGTCGGGCGGTTCCGCGCTGATCCTGGCCGCGTACTACCCGCAGCAGTTCCCGT
ACGCCGCGTCGTTGTCGGGCTTCCTCAACCCGTCCGAGGGCTGGTGGCCGACGCTGATC
GGCCTGGCGATGAACGACTCGGGCGGTTACAACGCCAACAGCATGTGGGGTCCGTCCAG
CGACCCGGCCTGGAAGCGCAACGACCCAATGGTTCAGATTCCCCGCCTGGTCGCCAACA
ACACCCGGATCTGGGTGTACTGCGGTAACGGCACACCCAGCGACCTCGGCGGCGACAAC
ATACCGGCGAAGTTCCTGGAAGGCCTCACCCTGCGCACCAACCAGACCTTCCGGGACAC
CTACGCGGCCGACGGTGGACGCAACGGGGTGTTTAACTTCCCGCCCAACGGAACACACT
CGTGGCCCTACTGGAACGAGCAGCTGGTCGCCATGAAGGCCGATATCCAGCATGTGCTC
AACGGCGCG [symbol] GCAGCTGTTGAGCGGCCGCA
CTCGAGCACCACCACCACCACCACTGAGATCCGGCTGCTAACAAAGCCCGAAAGGAAGCTGAG
TTGGCTGCTGCCACCGCTGAGCAATAACTAGCATAACCCCTTGGGGCCTCTAAACGGGTCTTG
AGGGGTTTTTTGCTGAAAGGAGGAACTATATCCGGAT
Protein sequence-Ag85C-C2391 Ecoli-pET28[6xHis-CthermoCohesin (underlined)-
m.tbAg85C (bold)]
(SEQ ID NO: 211)
MGSSHHHHHHSSGLVPRGSHMASMDLDAVRIKVDTVNAKPGDTVNIPVRFSGIPSKGIANCDFVYS
YDPNVLEIIEIKPGELIVDPNPTKSFDTAVYPDRKMIVFLFAEDSGTGAYAITKDGVFATIVAKVKEG
APNGLSVIKFVEVGGFANNDLVEQKTQFFDGGVNVGDTTEPATPTTPVTTPTTTDDLDAASCSCMT
FFEQVRRLRSAATTLPRRLAIAAMGAVLVYGLVGTFGGPATAGAFSRPGLPVEYLQVPSASM
GRDIKVQFQGGGPHAVYLLDGLRAQDDYNGWDINTPAFEEYYQSGLSVIMPVGGQSSFYTD
WYQPSQSNGQNYTYKWETFLTREMPAWLQANKGVSPTGNAAVGLSMSGGSALILAAYYPQ
QFPYAASLSGFLNPSEGWWPTLIGLAMNDSGGYNANSMWGPSSDPAWKRNDPMVQIPRLVA
NNTRIWVYCGNGTPSDLGGDNIPAKFLEGLTLRTNQTFRDTYAADGGRNGVFNFPPNGTHSW
PYWNEQLVAMKADIQHVLNGATPPAAPAAPAACSC
Rv2658-C2361 Ecoli-pET28[6xHis-CthermoCohesin (underlined)-m.tbRv2658 (bold)]
Additional modifications are in italics.
(SEQ ID NO: 212)
TGGCGAATGGGACGCGCCCTGTAGCGGCGCATTAAGCGCGGCGGGTGTGGTGGTTACGCGCAG
CGTGACCGCTACACTTGCCAGCGCCCTAGCGCCCGCTCCTTTCGCTTTCTTCCCTTCCTTTCTCG
CCACGTTCGCCGGCTTTCCCCGTCAAGCTCTAAATCGGGGGCTCCCTTTAGGGTTCCGATTTAG
TGCTTTACGGCACCTCGACCCCAAAAAACTTGATTAGGGTGATGGTTCACGTAGTGGGCCATC
GCCCTGATAGACGGTTTTTCGCCCTTTGACGTTGGAGTCCACGTTCTTTAATAGTGGACTCTTGT
TCCAAACTGGAACAACACTCAACCCTATCTCGGTCTATTCTTTTGATTTATAAGGGATTTTGCC
GATTTCGGCCTATTGGTTAAAAAATGAGCTGATTTAACAAAAATTTAACGCGAATTTTAACAA
AATATTAACGTTTACAATTTCAGGTGGCACTTTTCGGGGAAATGTGCGCGGAACCCCTATTTGT
TTATTTTTCTAAATACATTCAAATATGTATCCGCTCATGAATTAATTCTTAGAAAAACTCATCG
AGCATCAAATGAAACTGCAATTTATTCATATCAGGATTATCAATACCATATTTTTGAAAAAGCC
GTTTCTGTAATGAAGGAGAAAACTCACCGAGGCAGTTCCATAGGATGGCAAGATCCTGGTATC
GGTCTGCGATTCCGACTCGTCCAACATCAATACAACCTATTAATTTCCCCTCGTCAAAAATAAG
GTTATCAAGTGAGAAATCACCATGAGTGACGACTGAATCCGGTGAGAATGGCAAAAGTTTATG
CATTTCTTTCCAGACTTGTTCAACAGGCCAGCCATTACGCTCGTCATCAAAATCACTCGCATCA
ACCAAACCGTTATTCATTCGTGATTGCGCCTGAGCGAGACGAAATACGCGATCGCTGTTAAAA
GGACAATTACAAACAGGAATCGAATGCAACCGGCGCAGGAACACTGCCAGCGCATCAACAAT
ATTTTCACCTGAATCAGGATATTCTTCTAATACCTGGAATGCTGTTTTCCCGGGGATCGCAGTG
GTGAGTAACCATGCATCATCAGGAGTACGGATAAAATGCTTGATGGTCGGAAGAGGCATAAAT
TCCGTCAGCCAGTTTAGTCTGACCATCTCATCTGTAACATCATTGGCAACGCTACCTTTGCCAT
GTTTCAGAAACAACTCTGGCGCATCGGGCTTCCCATACAATCGATAGATTGTCGCACCTGATTG
CCCGACATTATCGCGAGCCCATTTATACCCATATAAATCAGCATCCATGTTGGAATTTAATCGC
GGCCTAGAGCAAGACGTTTCCCGTTGAATATGGCTCATAACACCCCTTGTATTACTGTTTATGT
AAGCAGACAGTTTTATTGTTCATGACCAAAATCCCTTAACGTGAGTTTTCGTTCCACTGAGCGT
CAGACCCCGTAGAAAAGATCAAAGGATCTTCTTGAGATCCTTTTTTTCTGCGCGTAATCTGCTG
CTTGCAAACAAAAAAACCACCGCTACCAGCGGTGGTTTGTTTGCCGGATCAAGAGCTACCAAC
TCTTTTTCCGAAGGTAACTGGCTTCAGCAGAGCGCAGATACCAAATACTGTCCTTCTAGTGTAG
CCGTAGTTAGGCCACCACTTCAAGAACTCTGTAGCACCGCCTACATACCTCGCTCTGCTAATCC
TGTTACCAGTGGCTGCTGCCAGTGGCGATAAGTCGTGTCTTACCGGGTTGGACTCAAGACGAT
AGTTACCGGATAAGGCGCAGCGGTCGGGCTGAACGGGGGGTTCGTGCACACAGCCCAGCTTG
GAGCGAACGACCTACACCGAACTGAGATACCTACAGCGTGAGCTATGAGAAAGCGCCACGCT
TCCCGAAGGGAGAAAGGCGGACAGGTATCCGGTAAGCGGCAGGGTCGGAACAGGAGAGCGCA
CGAGGGAGCTTCCAGGGGGAAACGCCTGGTATCTTTATAGTCCTGTCGGGTTTCGCCACCTCTG
ACTTGAGCGTCGATTTTTGTGATGCTCGTCAGGGGGGCGGAGCCTATGGAAAAACGCCAGCAA
CGCGGCCTTTTTACGGTTCCTGGCCTTTTGCTGGCCTTTTGCTCACATGTTCTTTCCTGCGTTATC
CCCTGATTCTGTGGATAACCGTATTACCGCCTTTGAGTGAGCTGATACCGCTCGCCGCAGCCGA
ACGACCGAGCGCAGCGAGTCAGTGAGCGAGGAAGCGGAAGAGCGCCTGATGCGGTATTTTCT
CCTTACGCATCTGTGCGGTATTTCACACCGCATATATGGTGCACTCTCAGTACAATCTGCTCTG
ATGCCGCATAGTTAAGCCAGTATACACTCCGCTATCGCTACGTGACTGGGTCATGGCTGCGCCC
CGACACCCGCCAACACCCGCTGACGCGCCCTGACGGGCTTGTCTGCTCCCGGCATCCGCTTAC
AGACAAGCTGTGACCGTCTCCGGGAGCTGCATGTGTCAGAGGTTTTCACCGTCATCACCGAAA
CGCGCGAGGCAGCTGCGGTAAAGCTCATCAGCGTGGTCGTGAAGCGATTCACAGATGTCTGCC
TGTTCATCCGCGTCCAGCTCGTTGAGTTTCTCCAGAAGCGTTAATGTCTGGCTTCTGATAAAGC
GTTCATGGGGGTAATGATACCGATGAAACGAGAGAGGATGCTCACGATACGGGTTACTGATGA
TGAACATGCCCGGTTACTGGAACGTTGTGAGGGTAAACAACTGGCGGTATGGATGCGGCGGGA
CCAGAGAAAAATCACTCAGGGTCAATGCCAGCGCTTCGTTAATACAGATGTAGGTGTTCCACA
GGGTAGCCAGCAGCATCCTGCGATGCAGATCCGGAACATAATGGTGCAGGGCGCTGACTTCCG
CGTTTCCAGACTTTACGAAACACGGAAACCGAAGACCATTCATGTTGTTGCTCAGGTCGCAGA
CGTTTTGCAGCAGCAGTCGCTTCACGTTCGCTCGCGTATCGGTGATTCATTCTGCTAACCAGTA
AGGCAACCCCGCCAGCCTAGCCGGGTCCTCAACGACAGGAGCACGATCATGCGCACCCGTGG
GGCCGCCATGCCGGCGATAATGGCCTGCTTCTCGCCGAAACGTTTGGTGGCGGGACCAGTGAC
GAAGGCTTGAGCGAGGGCGTGCAAGATTCCGAATACCGCAAGCGACAGGCCGATCATCGTCG
CGCTCCAGCGAAAGCGGTCCTCGCCGAAAATGACCCAGAGCGCTGCCGGCACCTGTCCTACGA
GTTGCATGATAAAGAAGACAGTCATAAGTGCGGCGACGATAGTCATGCCCCGCGCCCACCGGA
AGGAGCTGACTGGGTTGAAGGCTCTCAAGGGCATCGGTCGAGATCCCGGTGCCTAATGAGTGA
GCTAACTTACATTAATTGCGTTGCGCTCACTGCCCGCTTTCCAGTCGGGAAACCTGTCGTGCCA
GCTGCATTAATGAATCGGCCAACGCGCGGGGAGAGGCGGTTTGCGTATTGGGCGCCAGGGTGG
TTTTTCTTTTCACCAGTGAGACGGGCAACAGCTGATTGCCCTTCACCGCCTGGCCCTGAGAGAG
TTGCAGCAAGCGGTCCACGCTGGTTTGCCCCAGCAGGCGAAAATCCTGTTTGATGGTGGTTAA
CGGCGGGATATAACATGAGCTGTCTTCGGTATCGTCGTATCCCACTACCGAGATATCCGCACC
AACGCGCAGCCCGGACTCGGTAATGGCGCGCATTGCGCCCAGCGCCATCTGATCGTTGGCAAC
CAGCATCGCAGTGGGAACGATGCCCTCATTCAGCATTTGCATGGTTTGTTGAAAACCGGACAT
GGCACTCCAGTCGCCTTCCCGTTCCGCTATCGGCTGAATTTGATTGCGAGTGAGATATTTATGC
CAGCCAGCCAGACGCAGACGCGCCGAGACAGAACTTAATGGGCCCGCTAACAGCGCGATTTG
CTGGTGACCCAATGCGACCAGATGCTCCACGCCCAGTCGCGTACCGTCTTCATGGGAGAAAAT
AATACTGTTGATGGGTGTCTGGTCAGAGACATCAAGAAATAACGCCGGAACATTAGTGCAGGC
AGCTTCCACAGCAATGGCATCCTGGTCATCCAGCGGATAGTTAATGATCAGCCCACTGACGCG
TTGCGCGAGAAGATTGTGCACCGCCGCTTTACAGGCTTCGACGCCGCTTCGTTCTACCATCGAC
ACCACCACGCTGGCACCCAGTTGATCGGCGCGAGATTTAATCGCCGCGACAATTTGCGACGGC
GCGTGCAGGGCCAGACTGGAGGTGGCAACGCCAATCAGCAACGACTGTTTGCCCGCCAGTTGT
TGTGCCACGCGGTTGGGAATGTAATTCAGCTCCGCCATCGCCGCTTCCACTTTTTCCCGCGTTTT
CGCAGAAACGTGGCTGGCCTGGTTCACCACGCGGGAAACGGTCTGATAAGAGACACCGGCAT
ACTCTGCGACATCGTATAACGTTACTGGTTTCACATTCACCACCCTGAATTGACTCTCTTCCGG
GCGCTATCATGCCATACCGCGAAAGGTTTTGCGCCATTCGATGGTGTCCGGGATCTCGACGCTC
TCCCTTATGCGACTCCTGCATTAGGAAGCAGCCCAGTAGTAGGTTGAGGCCGTTGAGCACCGC
CGCCGCAAGGAATGGTGCATGCAAGGAGATGGCGCCCAACAGTCCCCCGGCCACGGGGCCTG
CCACCATACCCACGCCGAAACAAGCGCTCATGAGCCCGAAGTGGCGAGCCCGATCTTCCCCAT
CGGTGATGTCGGCGATATAGGCGCCAGCAACCGCACCTGTGGCGCCGGTGATGCCGGCCACGA
TGCGTCCGGCGTAGAGGATCGAGATCTCGATCCCGCGAAATTAATACGACTCACTATAGGGGA
ATTGTGAGCGGATAACAATTCCCCTCTAGAAATAATTTTGTTTAACTTTAAGAAGGAGATATAC
CATGGGCAGCAGCCATCATCATCATCATCACAGCAGCGGCCTGGTGCCGCGCGGCAGCCATAT
GGCTAGTATGGATCTGGATGCAGTAAGGATTAAAGTGGACACAGTAAATGCAAAACCGGGAG
ACACAGTAAATATACCTGTAAGATTCAGTGGTATACCATCCAAGGGAATAGCAAACTGTGACT
TTGTATACAGCTATGACCCGAATGTACTTGAGATAATAGAGATAAAACCGGGAGAATTGATAG
TTGACCCGAATCCTACCAAGAGCTTTGATACTGCAGTATATCCTGACAGAAAGATGATAGTAT
TCCTGTTTGCGGAAGACAGCGGAACAGGAGCGTATGCAATAACTAAAGACGGAGTATTTGCTA
CGATAGTAGCGAAAGTAAAAGAAGGAGCACCTAACGGGCTCAGTGTAATCAAATTTGTAGAA
GTAGGCGGATTTGCGAACAATGACCTTGTAGAACAGAAGACACAGTTCTTTGACGGTGGAGTA
AATGTTGGAGATACAACAGAACCTGCAACACCTACAACACCTGTAACAACACCGACAACAAC
AGATGATCTAGATGCAGCTAGC [symbol] TGCAACTGCGA
CGACGAACCGGGAGCGCTCATCATCGCCTGGATCGACGACGAACGACCCGCCGGCGGGC
ACATACAGATGCGGTCGAACACCCGCTTCACCGAAACACAGTGGGGCCGCCATATCGAG
TGGAAACTCGAATGCCGGGCATGCCGAAAGTATGCGCCGATATCCGAGATGACCGCCGC
GGCGATCCTCGACGGTTTCGGGGCGAAGCTTCACGAGCTGAGAACGTCGACCATCCCCG
ACGCTGACGATCCATCAATAGCAGAGGCGCGACACGTAATTCCGTTCAGC [symbol] [symbol]
GAATTCTAAGCGGCCGCACTCGAGCACCACCACCACCACCAC
TGAGATCCGGCTGCTAACAAAGCCCGAAAGGAAGCTGAGTTGGCTGCTGCCACCGCTGAGCAA
TAACTAGCATAACCCCTTGGGGCCTCTAAACGGGTCTTGAGGGGTTTTTTGCTGAAAGGAGGA
ACTATATCCGGAT
Protein sequence-Rv2658-C2361 Ecoli-pET28[6xHis-CthermoCohesin (underlined)-
m.tbRv2658 (bold)]
(SEQ ID NO: 213)
MGSSHHHHHHSSGLVPRGSHMASMDLDAVRIKVDTVNAKPGDTVNIPVRFSGIPSKGIANCDFVYS
YDPNVLEIIEIKPGELIVDPNPTKSFDTAVYPDRKMIVFLFAEDSGTGAYAITKDGVFATIVAKVKEG
APNGLSVIKFVEVGGFANNDLVEQKTQFFDGGVNVGDTTEPATPTTPVTTPTTTDDLDAASMADA
VKYVVMCNCDDEPGALIIAWIDDERPAGGHIQMRSNTRFTETQWGRHIEWKLECRACRKYA
PISEMTAAAILDGFGAKLHELRTSTIPDADDPSIAEARHVIPFSALCLRLSQLGGEF
Rv2659-C2388 Ecoli-pET28[6xHis-CthermoCohesin (underlined)-m.tbRv2659 (bold)]
Additional modifications are in italics.
(SEQ ID NO: 214)
TGGCGAATGGGACGCGCCCTGTAGCGGCGCATTAAGCGCGGCGGGTGTGGTGGTTACGCGCAG
CGTGACCGCTACACTTGCCAGCGCCCTAGCGCCCGCTCCTTTCGCTTTCTTCCCTTCCTTTCTCG
CCACGTTCGCCGGCTTTCCCCGTCAAGCTCTAAATCGGGGGCTCCCTTTAGGGTTCCGATTTAG
TGCTTTACGGCACCTCGACCCCAAAAAACTTGATTAGGGTGATGGTTCACGTAGTGGGCCATC
GCCCTGATAGACGGTTTTTCGCCCTTTGACGTTGGAGTCCACGTTCTTTAATAGTGGACTCTTGT
TCCAAACTGGAACAACACTCAACCCTATCTCGGTCTATTCTTTTGATTTATAAGGGATTTTGCC
GATTTCGGCCTATTGGTTAAAAAATGAGCTGATTTAACAAAAATTTAACGCGAATTTTAACAA
AATATTAACGTTTACAATTTCAGGTGGCACTTTTCGGGGAAATGTGCGCGGAACCCCTATTTGT
TTATTTTTCTAAATACATTCAAATATGTATCCGCTCATGAATTAATTCTTAGAAAAACTCATCG
AGCATCAAATGAAACTGCAATTTATTCATATCAGGATTATCAATACCATATTTTTGAAAAAGCC
GTTTCTGTAATGAAGGAGAAAACTCACCGAGGCAGTTCCATAGGATGGCAAGATCCTGGTATC
GGTCTGCGATTCCGACTCGTCCAACATCAATACAACCTATTAATTTCCCCTCGTCAAAAATAAG
GTTATCAAGTGAGAAATCACCATGAGTGACGACTGAATCCGGTGAGAATGGCAAAAGTTTATG
CATTTCTTTCCAGACTTGTTCAACAGGCCAGCCATTACGCTCGTCATCAAAATCACTCGCATCA
ACCAAACCGTTATTCATTCGTGATTGCGCCTGAGCGAGACGAAATACGCGATCGCTGTTAAAA
GGACAATTACAAACAGGAATCGAATGCAACCGGCGCAGGAACACTGCCAGCGCATCAACAAT
ATTTTCACCTGAATCAGGATATTCTTCTAATACCTGGAATGCTGTTTTCCCGGGGATCGCAGTG
GTGAGTAACCATGCATCATCAGGAGTACGGATAAAATGCTTGATGGTCGGAAGAGGCATAAAT
TCCGTCAGCCAGTTTAGTCTGACCATCTCATCTGTAACATCATTGGCAACGCTACCTTTGCCAT
GTTTCAGAAACAACTCTGGCGCATCGGGCTTCCCATACAATCGATAGATTGTCGCACCTGATTG
CCCGACATTATCGCGAGCCCATTTATACCCATATAAATCAGCATCCATGTTGGAATTTAATCGC
GGCCTAGAGCAAGACGTTTCCCGTTGAATATGGCTCATAACACCCCTTGTATTACTGTTTATGT
AAGCAGACAGTTTTATTGTTCATGACCAAAATCCCTTAACGTGAGTTTTCGTTCCACTGAGCGT
CAGACCCCGTAGAAAAGATCAAAGGATCTTCTTGAGATCCTTTTTTTCTGCGCGTAATCTGCTG
CTTGCAAACAAAAAAACCACCGCTACCAGCGGTGGTTTGTTTGCCGGATCAAGAGCTACCAAC
TCTTTTTCCGAAGGTAACTGGCTTCAGCAGAGCGCAGATACCAAATACTGTCCTTCTAGTGTAG
CCGTAGTTAGGCCACCACTTCAAGAACTCTGTAGCACCGCCTACATACCTCGCTCTGCTAATCC
TGTTACCAGTGGCTGCTGCCAGTGGCGATAAGTCGTGTCTTACCGGGTTGGACTCAAGACGAT
AGTTACCGGATAAGGCGCAGCGGTCGGGCTGAACGGGGGGTTCGTGCACACAGCCCAGCTTG
GAGCGAACGACCTACACCGAACTGAGATACCTACAGCGTGAGCTATGAGAAAGCGCCACGCT
TCCCGAAGGGAGAAAGGCGGACAGGTATCCGGTAAGCGGCAGGGTCGGAACAGGAGAGCGC
ACGAGGGAGCTTCCAGGGGGAAACGCCTGGTATCTTTATAGTCCTGTCGGGTTTCGCCACCTCT
GACTTGAGCGTCGATTTTTGTGATGCTCGTCAGGGGGGCGGAGCCTATGGAAAAACGCCAGCA
ACGCGGCCTTTTTACGGTTCCTGGCCTTTTGCTGGCCTTTTGCTCACATGTTCTTTCCTGCGTTA
TCCCCTGATTCTGTGGATAACCGTATTACCGCCTTTGAGTGAGCTGATACCGCTCGCCGCAGCC
GAACGACCGAGCGCAGCGAGTCAGTGAGCGAGGAAGCGGAAGAGCGCCTGATGCGGTATTTT
CTCCTTACGCATCTGTGCGGTATTTCACACCGCATATATGGTGCACTCTCAGTACAATCTGCTC
TGATGCCGCATAGTTAAGCCAGTATACACTCCGCTATCGCTACGTGACTGGGTCATGGCTGCGC
CCCGACACCCGCCAACACCCGCTGACGCGCCCTGACGGGCTTGTCTGCTCCCGGCATCCGCTTA
CAGACAAGCTGTGACCGTCTCCGGGAGCTGCATGTGTCAGAGGTTTTCACCGTCATCACCGAA
ACGCGCGAGGCAGCTGCGGTAAAGCTCATCAGCGTGGTCGTGAAGCGATTCACAGATGTCTGC
CTGTTCATCCGCGTCCAGCTCGTTGAGTTTCTCCAGAAGCGTTAATGTCTGGCTTCTGATAAAG
CGGGCCATGTTAAGGGCGGTTTTTTCCTGTTTGGTCACTGATGCCTCCGTGTAAGGGGGATTTC
TGTTCATGGGGGTAATGATACCGATGAAACGAGAGAGGATGCTCACGATACGGGTTACTGATG
ATGAACATGCCCGGTTACTGGAACGTTGTGAGGGTAAACAACTGGCGGTATGGATGCGGCGGG
ACCAGAGAAAAATCACTCAGGGTCAATGCCAGCGCTTCGTTAATACAGATGTAGGTGTTCCAC
AGGGTAGCCAGCAGCATCCTGCGATGCAGATCCGGAACATAATGGTGCAGGGCGCTGACTTCC
GCGTTTCCAGACTTTACGAAACACGGAAACCGAAGACCATTCATGTTGTTGCTCAGGTCGCAG
ACGTTTTGCAGCAGCAGTCGCTTCACGTTCGCTCGCGTATCGGTGATTCATTCTGCTAACCAGT
AAGGCAACCCCGCCAGCCTAGCCGGGTCCTCAACGACAGGAGCACGATCATGCGCACCCGTG
GGGCCGCCATGCCGGCGATAATGGCCTGCTTCTCGCCGAAACGTTTGGTGGCGGGACCAGTGA
CGAAGGCTTGAGCGAGGGCGTGCAAGATTCCGAATACCGCAAGCGACAGGCCGATCATCGTC
GCGCTCCAGCGAAAGCGGTCCTCGCCGAAAATGACCCAGAGCGCTGCCGGCACCTGTCCTACG
AGTTGCATGATAAAGAAGACAGTCATAAGTGCGGCGACGATAGTCATGCCCCGCGCCCACCGG
AAGGAGCTGACTGGGTTGAAGGCTCTCAAGGGCATCGGTCGAGATCCCGGTGCCTAATGAGTG
AGCTAACTTACATTAATTGCGTTGCGCTCACTGCCCGCTTTCCAGTCGGGAAACCTGTCGTGCC
AGCTGCATTAATGAATCGGCCAACGCGCGGGGAGAGGCGGTTTGCGTATTGGGCGCCAGGGTG
GTTTTTCTTTTCACCAGTGAGACGGGCAACAGCTGATTGCCCTTCACCGCCTGGCCCTGAGAGA
GTTGCAGCAAGCGGTCCACGCTGGTTTGCCCCAGCAGGCGAAAATCCTGTTTGATGGTGGTTA
ACGGCGGGATATAACATGAGCTGTCTTCGGTATCGTCGTATCCCACTACCGAGATATCCGCAC
CAACGCGCAGCCCGGACTCGGTAATGGCGCGCATTGCGCCCAGCGCCATCTGATCGTTGGCAA
CCAGCATCGCAGTGGGAACGATGCCCTCATTCAGCATTTGCATGGTTTGTTGAAAACCGGACA
TGGCACTCCAGTCGCCTTCCCGTTCCGCTATCGGCTGAATTTGATTGCGAGTGAGATATTTATG
CCAGCCAGCCAGACGCAGACGCGCCGAGACAGAACTTAATGGGCCCGCTAACAGCGCGATTT
GCTGGTGACCCAATGCGACCAGATGCTCCACGCCCAGTCGCGTACCGTCTTCATGGGAGAAAA
TAATACTGTTGATGGGTGTCTGGTCAGAGACATCAAGAAATAACGCCGGAACATTAGTGCAGG
CAGCTTCCACAGCAATGGCATCCTGGTCATCCAGCGGATAGTTAATGATCAGCCCACTGACGC
GTTGCGCGAGAAGATTGTGCACCGCCGCTTTACAGGCTTCGACGCCGCTTCGTTCTACCATCGA
CACCACCACGCTGGCACCCAGTTGATCGGCGCGAGATTTAATCGCCGCGACAATTTGCGACGG
CGCGTGCAGGGCCAGACTGGAGGTGGCAACGCCAATCAGCAACGACTGTTTGCCCGCCAGTTG
TTGTGCCACGCGGTTGGGAATGTAATTCAGCTCCGCCATCGCCGCTTCCACTTTTTCCCGCGTTT
TCGCAGAAACGTGGCTGGCCTGGTTCACCACGCGGGAAACGGTCTGATAAGAGACACCGGCAT
ACTCTGCGACATCGTATAACGTTACTGGTTTCACATTCACCACCCTGAATTGACTCTCTTCCGG
GCGCTATCATGCCATACCGCGAAAGGTTTTGCGCCATTCGATGGTGTCCGGGATCTCGACGCTC
TCCCTTATGCGACTCCTGCATTAGGAAGCAGCCCAGTAGTAGGTTGAGGCCGTTGAGCACCGC
CGCCGCAAGGAATGGTGCATGCAAGGAGATGGCGCCCAACAGTCCCCCGGCCACGGGGCCTG
CCACCATACCCACGCCGAAACAAGCGCTCATGAGCCCGAAGTGGCGAGCCCGATCTTCCCCAT
CGGTGATGTCGGCGATATAGGCGCCAGCAACCGCACCTGTGGCGCCGGTGATGCCGGCCACGA
TGCGTCCGGCGTAGAGGATCGAGATCTCGATCCCGCGAAATTAATACGACTCACTATAGGGGA
ATTGTGAGCGGATAACAATTCCCCTCTAGAAATAATTTTGTTTAACTTTAAGAAGGAGATATAC
CATGGGCAGCAGCCATCATCATCATCATCACAGCAGCGGCCTGGTGCCGCGCGGCAGCCATAT
GGCTAGTATGGATCTGGATGCAGTAAGGATTAAAGTGGACACAGTAAATGCAAAACCGGGAG
ACACAGTAAATATACCTGTAAGATTCAGTGGTATACCATCCAAGGGAATAGCAAACTGTGACT
TTGTATACAGCTATGACCCGAATGTACTTGAGATAATAGAGATAAAACCGGGAGAATTGATAG
TTGACCCGAATCCTACCAAGAGCTTTGATACTGCAGTATATCCTGACAGAAAGATGATAGTAT
TCCTGTTTGCGGAAGACAGCGGAACAGGAGCGTATGCAATAACTAAAGACGGAGTATTTGCTA
CGATAGTAGCGAAAGTAAAAGAAGGAGCACCTAACGGGCTCAGTGTAATCAAATTTGTAGAA
GTAGGCGGATTTGCGAACAATGACCTTGTAGAACAGAAGACACAGTTCTTTGACGGTGGAGTA
AATGTTGGAGATACAACAGAACCTGCAACACCTACAACACCTGTAACAACACCGACAACAAC
AGATGATCTAGATGCAGCTAGC [symbol] AATTCGGTCG
CATCCGACAGTTCAACTCCGGCCGCTGGCAAGCCAGCTACACCGGCCCCGACGGCCGCG
TGTACATCGCCCCCAAAACCTTCAACGCCAAGATCGACGCCGAAGCATGGCTCACCGAC
CGCCGCCGCGAAATCGACCGACAACTATGGTCCCCGGCATCGGGTCAGGAAGACCGCCC
CGGAGCCCCATTCGGTGAGTACGCCGAAGGATGGCTGAAGCAGCGTGGAATCAAGGACC
GCACCCGCGCCCACTATCGCAAACTGCTGGACAACCACATCCTGGCCACCTTCGCTGACA
CCGACCTACGCGACATCACCCCGGCCGCCGTGCGCCGCTGGTACGCCACCACCGCCGTG
GGCACACCGACCATGCGGGCACACTCCTACAGCTTGCTGCGCGCAATCATGCAGACCGC
CTTGGCCGACGACCTGATCGACTCCAACCCCTGCCGCATCTCAGGCGCGTCCACCGCCC
GCCGCGTCCACAAGATCAGGCCCGCCACCCTCGACGAGCTGGAAACCATCACCAAAGCC
ATGCCCGACCCCTACCAGGCGTTCGTGCTGATGGCGGCATGGCTGGCCATGCGCTACGG
CGAGCTGACCGAATTACGCCGCAAAGACATCGACCTGCACGGCGAGGTTGCGCGGGTGC
GGCGGGCTGTCGTTCGGGTGGGCGAAGGCTTCAAGGTGACGACACCGAAAAGCGATGC
GGGAGTGCGCGACATAAGTATCCCGCCACATCTGATACCCGCCATCGAAGACCACCTTC
ACAAACACGTCAACCCCGGCCGGGAGTCCCTGCTGTTCCCATCGGTCAACGACCCCAAC
CGTCACCTAGCACCCTCGGCGCTGTACCGCATGTTCTACAAGGCCCGAAAAGCCGCCGG
CCGACCAGACTTACGGGTGCACGACCTTCGACACTCCGGCGCCGTGTTGGCTGCATCCA
CCGGCGCCACACTGGCCGAACTGATGCAGCGGCTAGGACACAGCACAGCCGGCGCCGCA
CTCCGCTACCAGCACGCCGCCAAGGGCCGGGACCGCGAAATCGCCGCACTGTTAAGCAA
ACTGGCCGAGAACCAGGAGATGGAATTCTAAGCGGCCGCACTCGAGCACCACCACCACCAC
CACTGAGATCCGGCTGCTAACAAAGCCCGAAAGGAAGCTGAGTTGGCTGCTGCCACCGCTGAG
CAATAACTAGCATAACCCCTTGGGGCCTCTAAACGGGTCTTGAGGGGTTTTTTGCTGAAAGGA
GGAACTATATCCGGAT
Protein sequence-Rv2659-C2388 Ecoli-pET28[6xHis-CthermoCohesin (underlined)-
m.tbRv2659 (bold)]
(SEQ ID NO: 215)
MGSSHHHHHHSSGLVPRGSHMASMDLDAVRIKVDTVNAKPGDTVNIPVRFSGIPSKGIANCDFVYS
YDPNVLEIIEIKPGELIVDPNPTKSFDTAVYPDRKMIVFLFAEDSGTGAYAITKDGVFATIVAKVKEG
APNGLSVIKFVEVGGFANNDLVEQKTQFFDGGVNVGDTTEPATPTTPVTTPTTTDDLDAASVTQT
GKRQRRKFGRIRQFNSGRWQASYTGPDGRVYIAPKTFNAKIDAEAWLTDRRREIDRQLWSPA
SGQEDRPGAPFGEYAEGWLKQRGIKDRTRAHYRKLLDNHILATFADTDLRDITPAAVRRWY
ATTAVGTPTMRAHSYSLLRAIMQTALADDLIDSNPCRISGASTARRVHKIRPATLDELETITKA
MPDPYQAFVLMAAWLAMRYGELTELRRKDIDLHGEVARVRRAVVRVGEGFKVTTPKSDAG
VRDISIPPHLIPAIEDHLHKHVNPGRESLLFPSVNDPNRHLAPSALYRMFYKARKAAGRPDLRV
HDLRHSGAVLAASTGATLAELMQRLGHSTAGAALRYQHAAKGRDREIAALLSKLAENQEMEF
Rv0577-C2411 Ecoli-pET28[6xHis-CthermoCohesin (underlined)-m.tbRv0577 (bold)]
Additional modifications are in italics.
(SEQ ID NO: 216)
TGGCGAATGGGACGCGCCCTGTAGCGGCGCATTAAGCGCGGCGGGTGTGGTGGTTACGCGCAG
CGTGACCGCTACACTTGCCAGCGCCCTAGCGCCCGCTCCTTTCGCTTTCTTCCCTTCCTTTCTCG
CCACGTTCGCCGGCTTTCCCCGTCAAGCTCTAAATCGGGGGCTCCCTTTAGGGTTCCGATTTAG
TGCTTTACGGCACCTCGACCCCAAAAAACTTGATTAGGGTGATGGTTCACGTAGTGGGCCATC
GCCCTGATAGACGGTTTTTCGCCCTTTGACGTTGGAGTCCACGTTCTTTAATAGTGGACTCTTGT
TCCAAACTGGAACAACACTCAACCCTATCTCGGTCTATTCTTTTGATTTATAAGGGATTTTGCC
GATTTCGGCCTATTGGTTAAAAAATGAGCTGATTTAACAAAAATTTAACGCGAATTTTAACAA
AATATTAACGTTTACAATTTCAGGTGGCACTTTTCGGGGAAATGTGCGCGGAACCCCTATTTGT
TTATTTTTCTAAATACATTCAAATATGTATCCGCTCATGAATTAATTCTTAGAAAAACTCATCG
AGCATCAAATGAAACTGCAATTTATTCATATCAGGATTATCAATACCATATTTTTGAAAAAGCC
GTTTCTGTAATGAAGGAGAAAACTCACCGAGGCAGTTCCATAGGATGGCAAGATCCTGGTATC
GGTCTGCGATTCCGACTCGTCCAACATCAATACAACCTATTAATTTCCCCTCGTCAAAAATAAG
GTTATCAAGTGAGAAATCACCATGAGTGACGACTGAATCCGGTGAGAATGGCAAAAGTTTATG
CATTTCTTTCCAGACTTGTTCAACAGGCCAGCCATTACGCTCGTCATCAAAATCACTCGCATCA
ACCAAACCGTTATTCATTCGTGATTGCGCCTGAGCGAGACGAAATACGCGATCGCTGTTAAAA
GGACAATTACAAACAGGAATCGAATGCAACCGGCGCAGGAACACTGCCAGCGCATCAACAAT
ATTTTCACCTGAATCAGGATATTCTTCTAATACCTGGAATGCTGTTTTCCCGGGGATCGCAGTG
GTGAGTAACCATGCATCATCAGGAGTACGGATAAAATGCTTGATGGTCGGAAGAGGCATAAAT
TCCGTCAGCCAGTTTAGTCTGACCATCTCATCTGTAACATCATTGGCAACGCTACCTTTGCCAT
GTTTCAGAAACAACTCTGGCGCATCGGGCTTCCCATACAATCGATAGATTGTCGCACCTGATTG
CCCGACATTATCGCGAGCCCATTTATACCCATATAAATCAGCATCCATGTTGGAATTTAATCGC
GGCCTAGAGCAAGACGTTTCCCGTTGAATATGGCTCATAACACCCCTTGTATTACTGTTTATGT
AAGCAGACAGTTTTATTGTTCATGACCAAAATCCCTTAACGTGAGTTTTCGTTCCACTGAGCGT
CAGACCCCGTAGAAAAGATCAAAGGATCTTCTTGAGATCCTTTTTTTCTGCGCGTAATCTGCTG
CTTGCAAACAAAAAAACCACCGCTACCAGCGGTGGTTTGTTTGCCGGATCAAGAGCTACCAAC
TCTTTTTCCGAAGGTAACTGGCTTCAGCAGAGCGCAGATACCAAATACTGTCCTTCTAGTGTAG
CCGTAGTTAGGCCACCACTTCAAGAACTCTGTAGCACCGCCTACATACCTCGCTCTGCTAATCC
TGTTACCAGTGGCTGCTGCCAGTGGCGATAAGTCGTGTCTTACCGGGTTGGACTCAAGACGAT
AGTTACCGGATAAGGCGCAGCGGTCGGGCTGAACGGGGGGTTCGTGCACACAGCCCAGCTTG
GAGCGAACGACCTACACCGAACTGAGATACCTACAGCGTGAGCTATGAGAAAGCGCCACGCT
TCCCGAAGGGAGAAAGGCGGACAGGTATCCGGTAAGCGGCAGGGTCGGAACAGGAGAGCGC
ACGAGGGAGCTTCCAGGGGGAAACGCCTGGTATCTTTATAGTCCTGTCGGGTTTCGCCACCTCT
GACTTGAGCGTCGATTTTTGTGATGCTCGTCAGGGGGGCGGAGCCTATGGAAAAACGCCAGCA
ACGCGGCCTTTTTACGGTTCCTGGCCTTTTGCTGGCCTTTTGCTCACATGTTCTTTCCTGCGTTA
TCCCCTGATTCTGTGGATAACCGTATTACCGCCTTTGAGTGAGCTGATACCGCTCGCCGCAGCC
GAACGACCGAGCGCAGCGAGTCAGTGAGCGAGGAAGCGGAAGAGCGCCTGATGCGGTATTTTT
CTCCTTACGCATCTGTGCGGTATTTCACACCGCATATATGGTGCACTCTCAGTACAATCTGCTC
TGATGCCGCATAGTTAAGCCAGTATACACTCCGCTATCGCTACGTGACTGGGTCATGGCTGCGC
CCCGACACCCGCCAACACCCGCTGACGCGCCCTGACGGGCTTGTCTGCTCCCGGCATCCGCTTA
CAGACAAGCTGTGACCGTCTCCGGGAGCTGCATGTGTCAGAGGTTTTCACCGTCATCACCGAA
ACGCGCGAGGCAGCTGCGGTAAAGCTCATCAGCGTGGTCGTGAAGCGATTCACAGATGTCTGC
CTGTTCATCCGCGTCCAGCTCGTTGAGTTTCTCCAGAAGCGTTAATGTCTGGCTTCTGATAAAG
CGGGCCATGTTAAGGGCGGTTTTTTCCTGTTTGGTCACTGATGCCTCCGTGTAAGGGGGATTTC
TGTTCATGGGGGTAATGATACCGATGAAACGAGAGAGGATGCTCACGATACGGGTTACTGATG
ATGAACATGCCCGGTTACTGGAACGTTGTGAGGGTAAACAACTGGCGGTATGGATGCGGCGGG
ACCAGAGAAAAATCACTCAGGGTCAATGCCAGCGCTTCGTTAATACAGATGTAGGTGTTCCAC
AGGGTAGCCAGCAGCATCCTGCGATGCAGATCCGGAACATAATGGTGCAGGGCGCTGACTTCC
GCGTTTCCAGACTTTACGAAACACGGAAACCGAAGACCATTCATGTTGTTGCTCAGGTCGCAG
ACGTTTTGCAGCAGCAGTCGCTTCACGTTCGCTCGCGTATCGGTGATTCATTCTGCTAACCAGT
AAGGCAACCCCGCCAGCCTAGCCGGGTCCTCAACGACAGGAGCACGATCATGCGCACCCGTG
GGGCCGCCATGCCGGCGATAATGGCCTGCTTCTCGCCGAAACGTTTGGTGGCGGGACCAGTGA
CGAAGGCTTGAGCGAGGGCGTGCAAGATTCCGAATACCGCAAGCGACAGGCCGATCATCGTC
GCGCTCCAGCGAAAGCGGTCCTCGCCGAAAATGACCCAGAGCGCTGCCGGCACCTGTCCTACG
AGTTGCATGATAAAGAAGACAGTCATAAGTGCGGCGACGATAGTCATGCCCCGCGCCCACCGG
AAGGAGCTGACTGGGTTGAAGGCTCTCAAGGGCATCGGTCGAGATCCCGGTGCCTAATGAGTG
AGCTAACTTACATTAATTGCGTTGCGCTCACTGCCCGCTTTCCAGTCGGGAAACCTGTCGTGCC
AGCTGCATTAATGAATCGGCCAACGCGCGGGGAGAGGCGGTTTGCGTATTGGGCGCCAGGGTG
GTTTTTCTTTTCACCAGTGAGACGGGCAACAGCTGATTGCCCTTCACCGCCTGGCCCTGAGAGA
GTTGCAGCAAGCGGTCCACGCTGGTTTGCCCCAGCAGGCGAAAATCCTGTTTGATGGTGGTTA
ACGGCGGGATATAACATGAGCTGTCTTCGGTATCGTCGTATCCCACTACCGAGATATCCGCAC
CAACGCGCAGCCCGGACTCGGTAATGGCGCGCATTGCGCCCAGCGCCATCTGATCGTTGGCAA
CCAGCATCGCAGTGGGAACGATGCCCTCATTCAGCATTTGCATGGTTTGTTGAAAACCGGACA
TGGCACTCCAGTCGCCTTCCCGTTCCGCTATCGGCTGAATTTGATTGCGAGTGAGATATTTATG
CCAGCCAGCCAGACGCAGACGCGCCGAGACAGAACTTAATGGGCCCGCTAACAGCGCGATTT
GCTGGTGACCCAATGCGACCAGATGCTCCACGCCCAGTCGCGTACCGTCTTCATGGGAGAAAA
TAATACTGTTGATGGGTGTCTGGTCAGAGACATCAAGAAATAACGCCGGAACATTAGTGCAGG
CAGCTTCCACAGCAATGGCATCCTGGTCATCCAGCGGATAGTTAATGATCAGCCCACTGACGC
GTTGCGCGAGAAGATTGTGCACCGCCGCTTTACAGGCTTCGACGCCGCTTCGTTCTACCATCGA
CACCACCACGCTGGCACCCAGTTGATCGGCGCGAGATTTAATCGCCGCGACAATTTGCGACGG
CGCGTGCAGGGCCAGACTGGAGGTGGCAACGCCAATCAGCAACGACTGTTTGCCCGCCAGTTG
TTGTGCCACGCGGTTGGGAATGTAATTCAGCTCCGCCATCGCCGCTTCCACTTTTTCCCGCGTTT
TCGCAGAAACGTGGCTGGCCTGGTTCACCACGCGGGAAACGGTCTGATAAGAGACACCGGCAT
ACTCTGCGACATCGTATAACGTTACTGGTTTCACATTCACCACCCTGAATTGACTCTCTTCCGG
GCGCTATCATGCCATACCGCGAAAGGTTTTGCGCCATTCGATGGTGTCCGGGATCTCGACGCTC
TCCCTTATGCGACTCCTGCATTAGGAAGCAGCCCAGTAGTAGGTTGAGGCCGTTGAGCACCGC
CGCCGCAAGGAATGGTGCATGCAAGGAGATGGCGCCCAACAGTCCCCCGGCCACGGGGCCTG
CCACCATACCCACGCCGAAACAAGCGCTCATGAGCCCGAAGTGGCGAGCCCGATCTTCCCCAT
CGGTGATGTCGGCGATATAGGCGCCAGCAACCGCACCTGTGGCGCCGGTGATGCCGGCCACGA
TGCGTCCGGCGTAGAGGATCGAGATCTCGATCCCGCGAAATTAATACGACTCACTATAGGGGA
ATTGTGAGCGGATAACAATTCCCCTCTAGAAATAATTTTGTTTAACTTTAAGAAGGAGATATAC
CATGGGCAGCAGCCATCATCATCATCATCACAGCAGCGGCCTGGTGCCGCGCGGCAGCCATAT
GGCTAGTATGGATCTGGATGCAGTAAGGATTAAAGTGGACACAGTAAATGCAAAACCGGGAG
ACACAGTAAATATACCTGTAAGATTCAGTGGTATACCATCCAAGGGAATAGCAAACTGTGACT
TTGTATACAGCTATGACCCGAATGTACTTGAGATAATAGAGATAAAACCGGGAGAATTGATAG
TTGACCCGAATCCTACCAAGAGCTTTGATACTGCAGTATATCCTGACAGAAAGATGATAGTAT
TCCTGTTTGCGGAAGACAGCGGAACAGGAGCGTATGCAATAACTAAAGACGGAGTATTTGCTA
CGATAGTAGCGAAAGTAAAAGAAGGAGCACCTAACGGGCTCAGTGTAATCAAATTTGTAGAA
GTAGGCGGATTTGCGAACAATGACCTTGTAGAACAGAAGACACAGTTCTTTGACGGTGGAGTA
AATGTTGGAGATACAACAGAACCTGCAACACCTACAACACCTGTAACAACACCGACAACAAC
AGATGATCTAGATGCAGCTAGT [symbol] CCGAACTG
GGTCGACCTTCAGACCACCGATCAGTCCGCCGCCAAAAAGTTCTACACATCGTTGTTCGG
CTGGGGTTACGACGACAACCCGGTCCCCGGAGGCGGTGGGGTCTATTCCATGGCCACGC
TGAACGGCGAAGCCGTGGCCGCCATCGCACCGATGCCCCCGGGTGCACCGGAGGGGAT
GCCGCCGATCTGGAACACCTATATCGCGGTGGACGACGTCGATGCGGTGGTGGACAAGG
TGGTGCCCGGGGGCGGGCAGGTGATGATGCCGGCCTTCGACATCGGCGATGCCGGCCG
GATGTCGTTCATCACCGATCCGACCGGCGCTGCCGTGGGCCTATGGCAGGCCAATCGGC
ACATCGGAGCGACGTTGGTCAACGAGACGGGCACGCTCATCTGGAACGAACTGCTCACG
GACAAGCCGGATTTGGCGCTAGCGTTCTACGAGGCTGTGGTTGGCCTCACCCACTCGAG
CATGGAGATAGCTGCGGGCCAGAACTATCGGGTGCTCAAGGCCGGCGACGCGGAAGTCG
GCGGCTGTATGGAACCGCCGATGCCCGGCGTGCCGAATCATTGGCACGTCTACTTTGCG
GTGGATGACGCCGACGCCACGGCGGCCAAAGCCGCCGCAGCGGGCGGCCAGGTCATTG
CGGAACCGGCTGACATTCCGTCGGTGGGCCGGTTCGCCGTGTTGTCCGATCCGCAGGGC
GCG [symbol] GCGGCCGCACTCGAGCACCACCACC
ACCACCACTGAGATCCGGCTGCTAACAAAGCCCGAAAGGAAGCTGAGTTGGCTGCTGCCACCG
CTGAGCAATAACTAGCATAACCCCTTGGGGCCTCTAAACGGGTCTTGAGGGGTTTTTTGCTGAA
AGGAGGAACTATATCCGGAT
Protein sequence- Rv0577- C2411 Ecoli-pET28[6xHis-CthermoCohesin (underlined)-
m.tbRv0577 (bold)]
(SEQ ID NO: 217)
MGSSHHHHHHSSGLVPRGSHMASMDLDAVRIKVDTVNAKPGDTVNIPVRFSGIPSKGIANCDFVYS
YDPNVLEIIEIKPGELIVDPNPTKSFDTAVYPDRKMIVFLFAEDSGTGAYAITKDGVFATIVAKVKEG
APNGLSVIKFVEVGGFANNDLVEQKTQFFDGGVNVGDTTEPATPTTPVTTPTTTDDLDAASMPKR
SEYRQGTPNWVDLQTTDQSAAKKFYTSLFGWGYDDNPVPGGGGVYSMATLNGEAVAAIAP
MPPGAPEGMPPIWNTYIAVDDVDAVVDKVVPGGGQVMMPAFDIGDAGRMSFITDPTGAAVG
LWQANRHIGATLVNETGTLIWNELLTDKPDLALAFYEAVVGLTHSSMEIAAGQNYRVLKAG
DAEVGGCMEPPMPGVPNHWHVYFAVDDADATAAKAAAAGGQVIAEPADIPSVGRFAVLSDP
QGAIFSVLKPAPQQ
Mtb72f - C2236 Ecoli-pET28[6xHis-CthermoCohesin (underlined)-m.tbMtb72f (bold)]
Additional modifications are in italics.
(SEQ ID NO: 218)
TGGCGAATGGGACGCGCCCTGTAGCGGCGCATTAAGCGCGGCGGGTGTGGTGGTTACGCGCAG
CGTGACCGCTACACTTGCCAGCGCCCTAGCGCCCGCTCCTTTCGCTTTCTTCCCTTCCTTTCTCG
CCACGTTCGCCGGCTTTCCCCGTCAAGCTCTAAATCGGGGGCTCCCTTTAGGGTTCCGATTTAG
TGCTTTACGGCACCTCGACCCCAAAAAACTTGATTAGGGTGATGGTTCACGTAGTGGGCCATC
GCCCTGATAGACGGTTTTTCGCCCTTTGACGTTGGAGTCCACGTTCTTTAATAGTGGACTCTTGT
TCCAAACTGGAACAACACTCAACCCTATCTCGGTCTATTCTTTTGATTTATAAGGGATTTTGCC
GATTTCGGCCTATTGGTTAAAAAATGAGCTGATTTAACAAAAATTTAACGCGAATTTTAACAA
AATATTAACGTTTACAATTTCAGGTGGCACTTTTCGGGGAAATGTGCGCGGAACCCCTATTTGT
TTATTTTTCTAAATACATTCAAATATGTATCCGCTCATGAATTAATTCTTAGAAAAACTCATCG
AGCATCAAATGAAACTGCAATTTATTCATATCAGGATTATCAATACCATATTTTTGAAAAAGCC
GTTTCTGTAATGAAGGAGAAAACTCACCGAGGCAGTTCCATAGGATGGCAAGATCCTGGTATC
GGTCTGCGATTCCGACTCGTCCAACATCAATACAACCTATTAATTTCCCCTCGTCAAAAATAAG
GTTATCAAGTGAGAAATCACCATGAGTGACGACTGAATCCGGTGAGAATGGCAAAAGTTTATG
CATTTCTTTCCAGACTTGTTCAACAGGCCAGCCATTACGCTCGTCATCAAAATCACTCGCATCA
ACCAAACCGTTATTCATTCGTGATTGCGCCTGAGCGAGACGAAATACGCGATCGCTGTTAAAA
GGACAATTACAAACAGGAATCGAATGCAACCGGCGCAGGAACACTGCCAGCGCATCAACAAT
ATTTTCACCTGAATCAGGATATTCTTCTAATACCTGGAATGCTGTTTTCCCGGGGATCGCAGTG
GTGAGTAACCATGCATCATCAGGAGTACGGATAAAATGCTTGATGGTCGGAAGAGGCATAAAT
TCCGTCAGCCAGTTTAGTCTGACCATCTCATCTGTAACATCATTGGCAACGCTACCTTTGCCAT
GTTTCAGAAACAACTCTGGCGCATCGGGCTTCCCATACAATCGATAGATTGTCGCACCTGATTG
CCCGACATTATCGCGAGCCCATTTATACCCATATAAATCAGCATCCATGTTGGAATTTAATCGC
GGCCTAGAGCAAGACGTTTCCCGTTGAATATGGCTCATAACACCCCTTGTATTACTGTTTATGT
AAGCAGACAGTTTTATTGTTCATGACCAAAATCCCTTAACGTGAGTTTTCGTTCCACTGAGCGT
CAGACCCCGTAGAAAAGATCAAAGGATCTTCTTGAGATCCTTTTTTTCTGCGCGTAATCTGCTG
CTTGCAAACAAAAAAACCACCGCTACCAGCGGTGGTTTGTTTGCCGGATCAAGAGCTACCAAC
TCTTTTTCCGAAGGTAACTGGCTTCAGCAGAGCGCAGATACCAAATACTGTCCTTCTAGTGTAG
CCGTAGTTAGGCCACCACTTCAAGAACTCTGTAGCACCGCCTACATACCTCGCTCTGCTAATCC
TGTTACCAGTGGCTGCTGCCAGTGGCGATAAGTCGTGTCTTACCGGGTTGGACTCAAGACGAT
AGTTACCGGATAAGGCGCAGCGGTCGGGCTGAACGGGGGGTTCGTGCACACAGCCCAGCTTG
GAGCGAACGACCTACACCGAACTGAGATACCTACAGCGTGAGCTATGAGAAAGCGCCACGCT
TCCCGAAGGGAGAAAGGCGGACAGGTATCCGGTAAGCGGCAGGGTCGGAACAGGAGAGCGC
ACGAGGGAGCTTCCAGGGGGAAACGCCTGGTATCTTTATAGTCCTGTCGGGTTTCGCCACCTCT
GACTTGAGCGTCGATTTTTGTGATGCTCGTCAGGGGGGCGGAGCCTATGGAAAAACGCCAGCA
ACGCGGCCTTTTTACGGTTCCTGGCCTTTTGCTGGCCTTTTGCTCACATGTTCTTTCCTGCGTTA
TCCCCTGATTCTGTGGATAACCGTATTACCGCCTTTGAGTGAGCTGATACCGCTCGCCGCAGCC
GAACGACCGAGCGCAGCGAGTCAGTGAGCGAGGAAGCGGAAGAGCGCCTGATGCGGTATTTT
CTCCTTACGCATCTGTGCGGTATTTCACACCGCATATATGGTGCACTCTCAGTACAATCTGCTC
TGATGCCGCATAGTTAAGCCAGTATACACTCCGCTATCGCTACGTGACTGGGTCATGGCTGCGC
CCCGACACCCGCCAACACCCGCTGACGCGCCCTGACGGGCTTGTCTGCTCCCGGCATCCGCTTA
CAGACAAGCTGTGACCGTCTCCGGGAGCTGCATGTGTCAGAGGTTTTCACCGTCATCACCGAA
ACGCGCGAGGCAGCTGCGGTAAAGCTCATCAGCGTGGTCGTGAAGCGATTCACAGATGTCTGC
CTGTTCATCCGCGTCCAGCTCGTTGAGTTTCTCCAGAAGCGTTAATGTCTGGCTTCTGATAAAG
CGGGCCATGTTAAGGGCGGTTTTTTCCTGTTTGGTCACTGATGCCTCCGTGTAAGGGGGATTTC
TGTTCATGGGGGTAATGATACCGATGAAACGAGAGAGGATGCTCACGATACGGGTTACTGATG
ATGAACATGCCCGGTTACTGGAACGTTGTGAGGGTAAACAACTGGCGGTATGGATGCGGCGGG
ACCAGAGAAAAATCACTCAGGGTCAATGCCAGCGCTTCGTTAATACAGATGTAGGTGTTCCAC
AGGGTAGCCAGCAGCATCCTGCGATGCAGATCCGGAACATAATGGTGCAGGGCGCTGACTTCC
GCGTTTCCAGACTTTACGAAACACGGAAACCGAAGACCATTCATGTTGTTGCTCAGGTCGCAG
ACGTTTTGCAGCAGCAGTCGCTTCACGTTCGCTCGCGTATCGGTGATTCATTCTGCTAACCAGT
AAGGCAACCCCGCCAGCCTAGCCGGGTCCTCAACGACAGGAGCACGATCATGCGCACCCGTG
GGGCCGCCATGCCGGCGATAATGGCCTGCTTCTCGCCGAAACGTTTGGTGGCGGGACCAGTGA
CGAAGGCTTGAGCGAGGGCGTGCAAGATTCCGAATACCGCAAGCGACAGGCCGATCATCGTC
GCGCTCCAGCGAAAGCGGTCCTCGCCGAAAATGACCCAGAGCGCTGCCGGCACCTGTCCTACG
AGTTGCATGATAAAGAAGACAGTCATAAGTGCGGCGACGATAGTCATGCCCCGCGCCCACCGG
AAGGAGCTGACTGGGTTGAAGGCTCTCAAGGGCATCGGTCGAGATCCCGGTGCCTAATGAGTG
AGCTAACTTACATTAATTGCGTTGCGCTCACTGCCCGCTTTCCAGTCGGGAAACCTGTCGTGCC
AGCTGCATTAATGAATCGGCCAACGCGCGGGGAGAGGCGGTTTGCGTATTGGGCGCCAGGGTG
GTTTTTCTTTTCACCAGTGAGACGGGCAACAGCTGATTGCCCTTCACCGCCTGGCCCTGAGAGA
GTTGCAGCAAGCGGTCCACGCTGGTTTGCCCCAGCAGGCGAAAATCCTGTTTGATGGTGGTTA
ACGGCGGGATATAACATGAGCTGTCTTCGGTATCGTCGTATCCCACTACCGAGATATCCGCAC
CAACGCGCAGCCCGGACTCGGTAATGGCGCGCATTGCGCCCAGCGCCATCTGATCGTTGGCAA
CCAGCATCGCAGTGGGAACGATGCCCTCATTCAGCATTTGCATGGTTTGTTGAAAACCGGACA
TGGCACTCCAGTCGCCTTCCCGTTCCGCTATCGGCTGAATTTGATTGCGAGTGAGATATTTATG
CCAGCCAGCCAGACGCAGACGCGCCGAGACAGAACTTAATGGGCCCGCTAACAGCGCGATTT
GCTGGTGACCCAATGCGACCAGATGCTCCACGCCCAGTCGCGTACCGTCTTCATGGGAGAAAA
TAATACTGTTGATGGGTGTCTGGTCAGAGACATCAAGAAATAACGCCGGAACATTAGTGCAGG
CAGCTTCCACAGCAATGGCATCCTGGTCATCCAGCGGATAGTTAATGATCAGCCCACTGACGC
GTTGCGCGAGAAGATTGTGCACCGCCGCTTTACAGGCTTCGACGCCGCTTCGTTCTACCATCGA
CACCACCACGCTGGCACCCAGTTGATCGGCGCGAGATTTAATCGCCGCGACAATTTGCGACGG
CGCGTGCAGGGCCAGACTGGAGGTGGCAACGCCAATCAGCAACGACTGTTTGCCCGCCAGTTG
TTGTGCCACGCGGTTGGGAATGTAATTCAGCTCCGCCATCGCCGCTTCCACTTTTTCCCGCGTTT
TCGCAGAAACGTGGCTGGCCTGGTTCACCACGCGGGAAACGGTCTGATAAGAGACACCGGCAT
ACTCTGCGACATCGTATAACGTTACTGGTTTCACATTCACCACCCTGAATTGACTCTCTTCCGG
GCGCTATCATGCCATACCGCGAAAGGTTTTGCGCCATTCGATGGTGTCCGGGATCTCGACGCTC
TCCCTTATGCGACTCCTGCATTAGGAAGCAGCCCAGTAGTAGGTTGAGGCCGTTGAGCACCGC
CGCCGCAAGGAATGGTGCATGCAAGGAGATGGCGCCCAACAGTCCCCCGGCCACGGGGCCTG
CCACCATACCCACGCCGAAACAAGCGCTCATGAGCCCGAAGTGGCGAGCCCGATCTTCCCCAT
CGGTGATGTCGGCGATATAGGCGCCAGCAACCGCACCTGTGGCGCCGGTGATGCCGGCCACGA
TGCGTCCGGCGTAGAGGATCGAGATCTCGATCCCGCGAAATTAATACGACTCACTATAGGGGA
ATTGTGAGCGGATAACAATTCCCCTCTAGAAATAATTTTGTTTAACTTTAAGAAGGAGATATAC
CATGGGCAGCAGCCATCATCATCATCATCACAGCAGCGGCCTGGTGCCGCGCGGCAGCCATAT
GGCTAGTATGGATCTGGATGCAGTAAGGATTAAAGTGGACACAGTAAATGCAAAACCGGGAG
ACACAGTAAATATACCTGTAAGATTCAGTGGTATACCATCCAAGGGAATAGCAAACTGTGACT
TTGTATACAGCTATGACCCGAATGTACTTGAGATAATAGAGATAAAACCGGGAGAATTGATAG
TTGACCCGAATCCTACCAAGAGCTTTGATACTGCAGTATATCCTGACAGAAAGATGATAGTAT
TCCTGTTTGCGGAAGACAGCGGAACAGGAGCGTATGCAATAACTAAAGACGGAGTATTTGCTA
CGATAGTAGCGAAAGTAAAAGAAGGAGCACCTAACGGGCTCAGTGTAATCAAATTTGTAGAA
GTAGGCGGATTTGCGAACAATGACCTTGTAGAACAGAAGACACAGTTCTTTGACGGTGGAGTA
AATGTTGGAGATACAACAGAACCTGCAACACCTACAACACCTGTAACAACACCGACAACAAC
AGATGATCTAGATGCAGCTAGC [symbol] GGGTGGGCA
GGGATTCGCCATTCCGATCGGGCAGGCGATGGCGATCGCGGGCCAGATCCGATCGGGTG
GGGGGTCACCCACCGTTCATATCGGGCCTACCGCCTTCCTCGGCTTGGGTGTTGTCGAC
AACAACGGCAACGGCGCACGAGTCCAACGCGTGGTCGGGAGCGCTCCGGCGGCAAGTCT
CGGCATCTCCACCGGCGACGTGATCACCGCGGTCGACGGCGCTCCGATCAACTCGGCCA
CCGCGATGGCGGACGCGCTTAACGGGCATCATCCCGGTGACGTCATCTCGGTGACCTGG
CAAACCAAGTCGGGCGGCACGCGTACAGG [symbol] G
AATTC [symbol] AACTCCGCGAGGATGTACGCCGGC
CCGGGTTCGGCCTCGCTGGTGGCCGCGGCTCAGATGTGGGACAGCGTGGCGAGTGACCT
GTTTTCGGCCGCGTCGGCGTTTCAGTCGGTGGTCTGGGGTCTGACGGTGGGGTCGTGGA
TAGGTTCGTCGGCGGGTCTGATGGTGGCGGCGGCCTCGCCGTATGTGGCGTGGATGAGC
GTCACCGCGGGGCAGGCCGAGCTGACCGCCGCCCAGGTCCGGGTTGCTGCGGCGGCCT
ACGAGACGGCGTATGGGCTGACGGTGCCCCCGCCGGTGATCGCCGAGAACCGTGCTGAA
CTGATGATTCTGATAGCGACCAACCTCTTGGGGCAAAACACCCCGGCGATCGCGGTCAA
CGAGGCCGAATACGGCGAGATGTGGGCCCAAGACGCCGCCGCGATGTTTGGCTACGCCG
CGGCGACGGCGACGGCGACGGCGACGTTGCTGCCGTTCGAGGAGGCGCCGGAGATGAC
CAGCGCGGGTGGGCTCCTCGAGCAGGCCGCCGCGGTCGAGGAGGCCTCCGACACCGCC
GCGGCGAACCAGTTGATGAACAATGTGCCCCAGGCGCTGCAACAGCTGGCCCAGCCCAC
GCAGGGCACCACGCCTTCTTCCAAGCTGGGTGGCCTGTGGAAGACGGTCTCGCCGCATC
GGTCGCCGATCAGCAACATGGTGTCGATGGCCAACAACCACATGTCGATGACCAACTCG
GGTGTGTCGATGACCAACACCTTGAGCTCGATGTTGAAGGGCTTTGCTCCGGCGGCGGC
CGCCCAGGCCGTGCAAACCGCGGCGCAAAACGGGGTCCGGGCGATGAGCTCGCTGGGC
AGCTCGCTGGGTTCTTCGGGTCTGGGCGGTGGGGTGGCCGCCAACTTGGGTCGGGCGGC
CTCGGTCGGTTCGTTGTCGGTGCCGCAGGCCTGGGCCGCGGCCAACCAGGCAGTCACCC
CGGCGGCGCGGGCGCTGCCGCTGACCAGCCTGACCAGCGCCGCGGAAAGAGGGCCCGG
GCAGATGCTGGGCGGGCTGCCGGTGGGGCAGATGGGCGCCAGGGCCGGTGGTGGGCTC
AGTGGTGTGCTGCGTGTTCCGCCGCG [symbol] [symbol] [symbol]
CCGACTTCCCCGCGCTGCCCCTCGACC
CGTCCGCGATGGTCGCCCAAGTGGGGCCACAGGTGGTCAACATCAACACCAAACTGGGC
TACAACAACGCCGTGGGCGCCGGGACCGGCATCGTCATCGATCCCAACGGTGTCGTGCT
GACCAACAACCACGTGATCGCGGGCGCCACCGACATCAATGCGTTCAGCGTCGGCTCCG
GCCAAACCTACGGCGTCGATGTGGTCGGGTATGACCGCACCCAGGATGTCGCGGTGCTG
CAGCTGCGCGGTGCCGGTGGCCTGCCGTCGGCGGCGATCGGTGGCGGCGTCGCGGTTG
GTGAGCCCGTCGTCGCGATGGGCAACAGCGGTGGGCAGGGCGGAACGCCCCGTGCGGT
GCCTGGCAGGGTGGTCGCGCTCGGCCAAACCGTGCAGGCGTCGGATTCGCTGACCGGTG
CCGAAGAGACATTGAACGGGTTGATCCAGTTCGATGCCGCGATCCAGCCCGGTGATTCG
GGCGGGCCCGTCGTCAACGGCCT [symbol] [symbol]
GCACTCGAGCACCACCACCACCACCAC [symbol] GATCCGGCTGCTAACAAAGCC
CGAAAGGAAGCTGAGTTGGCTGCTGCCACCGCTGAGCAATAACTAGCATAACCCCTTGGGGCC
TCTAAACGGGTCTTGAGGGGTTTTTTGCTGAAAGGAGGAACTATATCCGGAT
Protein sequence - Mtb72f - C2236 Ecoli-pET28[6xHis-CthermoCohesin (underlined)-
m.tbMtb72f (bold)]
(SEQ ID NO: 219)
MGSSHHHHHHSSGLVPRGSHMASMDLDAVRIKVDTVNAKPGDTVNIPVRFSGIPSKGIANCDFVYS
YDPNVLEIIEIKPGELIVDPNPTKSFDTAVYPDRKMIVFLFAEDSGTGAYAITKDGVFATIVAKVKEG
APNGLSVIKFVEVGGFANNDLVEQKTQFFDGGVNVGDTTEPATPTTPVTTPTTTDDLDAASTAASD
NFQLSQGGQGFAIPIGQAMAIAGQIRSGGGSPTVHIGPTAFLGLGVVDNNGNGARVQRVVGS
APAASLGISTGDVITAVDGAPINSATAMADALNGHHPGDVISVTWQTKSGGTRTGNVTLAEGP
PAEFMVDFGALPPEINSARMYAGPGSASLVAAAQMWDSVASDLFSAASAFQSVVWGLTVGS
WIGSSAGLMVAAASPYVAWMSVTAGQAELTAAQVRVAAAAYETAYGLTVPPPVIAENRAEL
MILIATNLLGQNTPAIAVNEAEYGEMWAQDAAAMFGYAAATATATATLLPFEEAPEMTSAG
GLLEQAAAVEEASDTAAANQLMNNVPQALQQLAQPTQGTTPSSKLGGLWKTVSPHRSPISN
MVSMANNHMSMTNSGVSMTNTLSSMLKGFAPAAAAQAVQTAAQNGVRAMSSLGSSLGSSG
LGGGVAANLGRAASVGSLSVPQAWAAANQAVTPAARALPLTSLTSAAERGPGQMLGGLPVG
QMGARAGGGLSGVLRVPPRPYVMPHSPAAGDIAPPALSQDRFADFPALPLDPSAMVAQVGPQ
VVNINTKLGYNNAVGAGTGIVIDPNGVVLTNNHVIAGATDINAFSVGSGQTYGVDVVGYDRT
QDVAVLQLRGAGGLPSAAIGGGVAVGEPVVAMGNSGGQGGTPRAVPGRVVALGQTVQASD
SLTGAEETLNGLIQFDAAIQPGDSGGPVVNGLGQVVGMNTAAS
Rv1411-LPTEG - C2198 Ecoli-pET28[6xHis-CthermoCohesin (underlined)-m.tbRv1411-
LPETGsite-6xHis (bold)] Additional modifications are in italics.
(SEQ ID NO: 220)
TGGCGAATGGGACGCGCCCTGTAGCGGCGCATTAAGCGCGGCGGGTGTGGTGGTTACGCGCAG
CGTGACCGCTACACTTGCCAGCGCCCTAGCGCCCGCTCCTTTCGCTTTCTTCCCTTCCTTTCTCG
CCACGTTCGCCGGCTTTCCCCGTCAAGCTCTAAATCGGGGGCTCCCTTTAGGGTTCCGATTTAG
TGCTTTACGGCACCTCGACCCCAAAAAACTTGATTAGGGTGATGGTTCACGTAGTGGGCCATC
GCCCTGATAGACGGTTTTTCGCCCTTTGACGTTGGAGTCCACGTTCTTTAATAGTGGACTCTTGT
TCCAAACTGGAACAACACTCAACCCTATCTCGGTCTATTCTTTTGATTTATAAGGGATTTTGCC
GATTTCGGCCTATTGGTTAAAAAATGAGCTGATTTAACAAAAATTTAACGCGAATTTTAACAA
AATATTAACGTTTACAATTTCAGGTGGCACTTTTCGGGGAAATGTGCGCGGAACCCCTATTTGT
TTATTTTTCTAAATACATTCAAATATGTATCCGCTCATGAATTAATTCTTAGAAAAACTCATCG
AGCATCAAATGAAACTGCAATTTATTCATATCAGGATTATCAATACCATATTTTTGAAAAAGCC
GTTTCTGTAATGAAGGAGAAAACTCACCGAGGCAGTTCCATAGGATGGCAAGATCCTGGTATC
GGTCTGCGATTCCGACTCGTCCAACATCAATACAACCTATTAATTTCCCCTCGTCAAAAATAAG
GTTATCAAGTGAGAAATCACCATGAGTGACGACTGAATCCGGTGAGAATGGCAAAAGTTTATG
CATTTCTTTCCAGACTTGTTCAACAGGCCAGCCATTACGCTCGTCATCAAAATCACTCGCATCA
ACCAAACCGTTATTCATTCGTGATTGCGCCTGAGCGAGACGAAATACGCGATCGCTGTTAAAA
GGACAATTACAAACAGGAATCGAATGCAACCGGCGCAGGAACACTGCCAGCGCATCAACAAT
ATTTTCACCTGAATCAGGATATTCTTCTAATACCTGGAATGCTGTTTTCCCGGGGATCGCAGTG
GTGAGTAACCATGCATCATCAGGAGTACGGATAAAATGCTTGATGGTCGGAAGAGGCATAAAT
TCCGTCAGCCAGTTTAGTCTGACCATCTCATCTGTAACATCATTGGCAACGCTACCTTTGCCAT
GTTTCAGAAACAACTCTGGCGCATCGGGCTTCCCATACAATCGATAGATTGTCGCACCTGATTG
CCCGACATTATCGCGAGCCCATTTATACCCATATAAATCAGCATCCATGTTGGAATTTAATCGC
GGCCTAGAGCAAGACGTTTCCCGTTGAATATGGCTCATAACACCCCTTGTATTACTGTTTATGT
AAGCAGACAGTTTTATTGTTCATGACCAAAATCCCTTAACGTGAGTTTTCGTTCCACTGAGCGT
CAGACCCCGTAGAAAAGATCAAAGGATCTTCTTGAGATCCTTTTTTTCTGCGCGTAATCTGCTG
CTTGCAAACAAAAAAACCACCGCTACCAGCGGTGGTTTGTTTGCCGGATCAAGAGCTACCAAC
TCTTTTTCCGAAGGTAACTGGCTTCAGCAGAGCGCAGATACCAAATACTGTCCTTCTAGTGTAG
CCGTAGTTAGGCCACCACTTCAAGAACTCTGTAGCACCGCCTACATACCTCGCTCTGCTAATCC
TGTTACCAGTGGCTGCTGCCAGTGGCGATAAGTCGTGTCTTACCGGGTTGGACTCAAGACGAT
AGTTACCGGATAAGGCGCAGCGGTCGGGCTGAACGGGGGGTTCGTGCACACAGCCCAGCTTG
GAGCGAACGACCTACACCGAACTGAGATACCTACAGCGTGAGCTATGAGAAAGCGCCACGCT
TCCCGAAGGGAGAAAGGCGGACAGGTATCCGGTAAGCGGCAGGGTCGGAACAGGAGAGCGC
ACGAGGGAGCTTCCAGGGGGAAACGCCTGGTATCTTTATAGTCCTGTCGGGTTTCGCCACCTCT
GACTTGAGCGTCGATTTTTGTGATGCTCGTCAGGGGGGCGGAGCCTATGGAAAAACGCCAGCA
ACGCGGCCTTTTTACGGTTCCTGGCCTTTTGCTGGCCTTTTGCTCACATGTTCTTTCCTGCGTTA
TCCCCTGATTCTGTGGATAACCGTATTACCGCCTTTGAGTGAGCTGATACCGCTCGCCGCAGCC
GAACGACCGAGCGCAGCGAGTCAGTGAGCGAGGAAGCGGAAGAGCGCCTGATGCGGTATTTT
CTCCTTACGCATCTGTGCGGTATTTCACACCGCATATATGGTGCACTCTCAGTACAATCTGCTC
TGATGCCGCATAGTTAAGCCAGTATACACTCCGCTATCGCTACGTGACTGGGTCATGGCTGCGC
CCCGACACCCGCCAACACCCGCTGACGCGCCCTGACGGGCTTGTCTGCTCCCGGCATCCGCTTA
CAGACAAGCTGTGACCGTCTCCGGGAGCTGCATGTGTCAGAGGTTTTCACCGTCATCACCGAA
ACGCGCGAGGCAGCTGCGGTAAAGCTCATCAGCGTGGTCGTGAAGCGATTCACAGATGTCTGC
CTGTTCATCCGCGTCCAGCTCGTTGAGTTTCTCCAGAAGCGTTAATGTCTGGCTTCTGATAAAG
CGGGCCATGTTAAGGGCGGTTTTTTCCTGTTTGGTCACTGATGCCTCCGTGTAAGGGGGATTTC
TGTTCATGGGGGTAATGATACCGATGAAACGAGAGAGGATGCTCACGATACGGGTTACTGATG
ATGAACATGCCCGGTTACTGGAACGTTGTGAGGGTAAACAACTGGCGGTATGGATGCGGCGGG
ACCAGAGAAAAATCACTCAGGGTCAATGCCAGCGCTTCGTTAATACAGATGTAGGTGTTCCAC
AGGGTAGCCAGCAGCATCCTGCGATGCAGATCCGGAACATAATGGTGCAGGGCGCTGACTTCC
GCGTTTCCAGACTTTACGAAACACGGAAACCGAAGACCATTCATGTTGTTGCTCAGGTCGCAG
ACGTTTTGCAGCAGCAGTCGCTTCACGTTCGCTCGCGTATCGGTGATTCATTCTGCTAACCAGT
AAGGCAACCCCGCCAGCCTAGCCGGGTCCTCAACGACAGGAGCACGATCATGCGCACCCGTG
GGGCCGCCATGCCGGCGATAATGGCCTGCTTCTCGCCGAAACGTTTGGTGGCGGGACCAGTGA
CGAAGGCTTGAGCGAGGGCGTGCAAGATTCCGAATACCGCAAGCGACAGGCCGATCATCGTC
GCGCTCCAGCGAAAGCGGTCCTCGCCGAAAATGACCCAGAGCGCTGCCGGCACCTGTCCTACG
AGTTGCATGATAAAGAAGACAGTCATAAGTGCGGCGACGATAGTCATGCCCCGCGCCCACCGG
AAGGAGCTGACTGGGTTGAAGGCTCTCAAGGGCATCGGTCGAGATCCCGGTGCCTAATGAGTG
AGCTAACTTACATTAATTGCGTTGCGCTCACTGCCCGCTTTCCAGTCGGGAAACCTGTCGTGCC
AGCTGCATTAATGAATCGGCCAACGCGCGGGGAGAGGCGGTTTGCGTATTGGGCGCCAGGGTG
GTTTTTCTTTTCACCAGTGAGACGGGCAACAGCTGATTGCCCTTCACCGCCTGGCCCTGAGAGA
GTTGCAGCAAGCGGTCCACGCTGGTTTGCCCCAGCAGGCGAAAATCCTGTTTGATGGTGGTTA
ACGGCGGGATATAACATGAGCTGTCTTCGGTATCGTCGTATCCCACTACCGAGATATCCGCAC
CAACGCGCAGCCCGGACTCGGTAATGGCGCGCATTGCGCCCAGCGCCATCTGATCGTTGGCAA
CCAGCATCGCAGTGGGAACGATGCCCTCATTCAGCATTTGCATGGTTTGTTGAAAACCGGACA
TGGCACTCCAGTCGCCTTCCCGTTCCGCTATCGGCTGAATTTGATTGCGAGTGAGATATTTATG
CCAGCCAGCCAGACGCAGACGCGCCGAGACAGAACTTAATGGGCCCGCTAACAGCGCGATTT
GCTGGTGACCCAATGCGACCAGATGCTCCACGCCCAGTCGCGTACCGTCTTCATGGGAGAAAA
TAATACTGTTGATGGGTGTCTGGTCAGAGACATCAAGAAATAACGCCGGAACATTAGTGCAGG
CAGCTTCCACAGCAATGGCATCCTGGTCATCCAGCGGATAGTTAATGATCAGCCCACTGACGC
GTTGCGCGAGAAGATTGTGCACCGCCGCTTTACAGGCTTCGACGCCGCTTCGTTCTACCATCGA
CACCACCACGCTGGCACCCAGTTGATCGGCGCGAGATTTAATCGCCGCGACAATTTGCGACGG
CGCGTGCAGGGCCAGACTGGAGGTGGCAACGCCAATCAGCAACGACTGTTTGCCCGCCAGTTG
TTGTGCCACGCGGTTGGGAATGTAATTCAGCTCCGCCATCGCCGCTTCCACTTTTTCCCGCGTTT
TCGCAGAAACGTGGCTGGCCTGGTTCACCACGCGGGAAACGGTCTGATAAGAGACACCGGCAT
ACTCTGCGACATCGTATAACGTTACTGGTTTCACATTCACCACCCTGAATTGACTCTCTTCCGG
GCGCTATCATGCCATACCGCGAAAGGTTTTGCGCCATTCGATGGTGTCCGGGATCTCGACGCTC
TCCCTTATGCGACTCCTGCATTAGGAAGCAGCCCAGTAGTAGGTTGAGGCCGTTGAGCACCGC
CGCCGCAAGGAATGGTGCATGCAAGGAGATGGCGCCCAACAGTCCCCCGGCCACGGGGCCTG
CCACCATACCCACGCCGAAACAAGCGCTCATGAGCCCGAAGTGGCGAGCCCGATCTTCCCCAT
CGGTGATGTCGGCGATATAGGCGCCAGCAACCGCACCTGTGGCGCCGGTGATGCCGGCCACGA
TGCGTCCGGCGTAGAGGATCGAGATCTCGATCCCGCGAAATTAATACGACTCACTATAGGGGA
ATTGTGAGCGGATAACAATTCCCCTCTAGAAATAATTTTGTTTAACTTTAAGAAGGAGATATAC
CATGGGCAGCAGCCATCATCATCATCATCACAGCAGCGGCCTGGTGCCGCGCGGCAGCCATAT
GGCTAGTATGGATCTGGATGCAGTAAGGATTAAAGTGGACACAGTAAATGCAAAACCGGGAG
ACACAGTAAATATACCTGTAAGATTCAGTGGTATACCATCCAAGGGAATAGCAAACTGTGACT
TTGTATACAGCTATGACCCGAATGTACTTGAGATAATAGAGATAAAACCGGGAGAATTGATAG
TTGACCCGAATCCTACCAAGAGCTTTGATACTGCAGTATATCCTGACAGAAAGATGATAGTAT
TCCTGTTTGCGGAAGACAGCGGAACAGGAGCGTATGCAATAACTAAAGACGGAGTATTTGCTA
CGATAGTAGCGAAAGTAAAAGAAGGAGCACCTAACGGGCTCAGTGTAATCAAATTTGTAGAA
GTAGGCGGATTTGCGAACAATGACCTTGTAGAACAGAAGACACAGTTCTTTGACGGTGGAGTA
AATGTTGGAGATACAACAGAACCTGCAACACCTACAACACCTGTAACAACACCGACAACAAC
AGATGATCTAGATGCAGCTAGC [symbol] TCGCCGTCCT
CGCCGCCGTTAGCATCGCCGCCACTGTCGTTGCCGGCTGCTCGTCGGGCTCGAAGCCAA
GCGGCGGACCACTTCCGGACGCGAAGCCGCTGGTCGAGGAGGCCACCGCGCAGACCAA
GGCTCTCAAGAGCGCGCACATGGTGCTGACGGTCAACGGCAAGATCCCGGGACTGTCTC
TGAAGACGCTGAGCGGCGATCTCACCACCAACCCCACCGCCGCGACGGGAAACGTCAAG
CTCACGCTGGGTGGGTCTGATATCGATGCCGACTTCGTGGTGTTCGACGGGATCCTGTA
CGCCACCCTGACGCCCAACCAGTGGAGCGATTTCGGTCCCGCCGCCGACATCTACGACC
CCGCCCAGGTGCTGAATCCGGATACCGGCCTGGCCAACGTGCTGGCGAATTTCGCCGAC
GCAAAAGCCGAAGGGCGGGATACCATCAACGGCCAGAACACCATCCGCATCAGCGGGAA
GGTATCGGCACAGGCGGTGAACCAGATAGCGCCGCCGTTCAACGCGACGCAGCCGGTGC
CGGCGACCGTCTGGATTCAGGAGACCGGCGATCATCAACTGGCACAGGCCCAGTTGGAC
CGCGGCTCGGGCAATTCCGTCCAGATGACCTTGTCGAAATGGGGCGAGA [symbol] [symbol]
CTGCCTGAGACTGGTGAAGCACATCACCATCACCATCACTGAGCG
GCCGCACTCGAGCACCACCACCACCACCACTGAGATCCGGCTGCTAACAAAGCCCGAAAGGAA
GCTGAGTTGGCTGCTGCCACCGCTGAGCAATAACTAGCATAACCCCTTGGGGCCTCTAAACGG
GTCTTGAGGGGTTTTTTGCTGAAAGGAGGAACTATATCCGGAT
Protein sequence - Rv1411-LPTEG - C2198 Ecoli-pET28[6xHis-CthermoCohesin
(underlined)- m.tbRv1411-LPETGsite-6xHis (bold)]
(SEQ ID NO: 221)
MGSSHHHHHHSSGLVPRGSHMASMDLDAVRIKVDTVNAKPGDTVNIPVRFSGIPSKGIANCDFVYS
YDPNVLEIIEIKPGELIVDPNPTKSFDTAVYPDRKMIVFLFAEDSGTGAYAITKDGVFATIVAKVKEG
APNGLSVIKFVEVGGFANNDLVEQKTQFFDGGVNVGDTTEPATPTTPVTTPTTTDDLDAASMRTP
RRHCRRIAVLAAVSIAATVVAGCSSGSKPSGGPLPDAKPLVEEATAQTKALKSAHMVLTVNG
KIPGLSLKTLSGDLTTNPTAATGNVKLTLGGSDIDADFVVFDGILYATLTPNQWSDFGPAADIY
DPAQVLNPDTGLANVLANFADAKAEGRDTINGQNTIRISGKVSAQAVNQIAPPFNATQPVPAT
VWIQETGDHQLAQAQLDRGSGNSVQMTLSKWGEKVQVTKPPVSLPETGEAHHHHHH

[0054] It is contemplated that any embodiment discussed in this specification can be implemented with respect to any method, kit, reagent, or composition of the invention, and vice versa. Furthermore, compositions of the invention can be used to achieve methods of the invention.

[0055] It may be understood that particular embodiments described herein are shown by way of illustration and not as limitations of the invention. The principal features of this invention can be employed in various embodiments without departing from the scope of the invention. Those skilled in the art will recognize, or be able to ascertain using no more than routine experimentation, numerous equivalents to the specific procedures described herein. Such equivalents are considered to be within the scope of this invention and are covered by the claims.

[0056] All publications and patent applications mentioned in the specification are indicative of the level of skill of those skilled in the art to which this invention pertains. All publications and patent applications are herein incorporated by reference to the same extent as if each individual publication or patent application was specifically and individually indicated to be incorporated by reference.

[0057] The use of the word “a” or “an” when used in conjunction with the term “comprising” in the claims and/or the specification may mean “one,” but it is also consistent with the meaning of “one or more,” “at least one,” and “one or more than one.” The use of the term “or” in the claims is used to mean “and/or” unless explicitly indicated to refer to alternatives only or the alternatives are mutually exclusive, although the disclosure supports a definition that refers to only alternatives and “and/or.” Throughout this application, the term “about” is used to indicate that a value includes the inherent variation of error for the device, the method being employed to determine the value, or the variation that exists among the study subjects.

[0058] As used in this specification and claim(s), the words “comprising” (and any form of comprising, such as “comprise” and “comprises”), “having” (and any form of having, such as “have” and “has”), “including” (and any form of including, such as “includes” and “include”) or “containing” (and any form of containing, such as “contains” and “contain”) are inclusive or open-ended and do not exclude additional, unrecited elements or method steps.

[0059] The term “or combinations thereof” as used herein refers to all permutations and combinations of the listed items preceding the term. For example, “A, B, C, or combinations thereof” is intended to include at least one of: A, B, C, AB, AC, BC, or ABC, and if order is important in a particular context, also BA, CA, CB, CBA, BCA, ACB, BAC, or CAB. Continuing with this example, expressly included are combinations that contain repeats of one or more item or term, such as BB, AAA, MB, BBC, AAABCCCC, CBBAAA, CABABB, and so forth. The skilled artisan will understand that typically there is no limit on the number of items or terms in any combination, unless otherwise apparent from the context.

[0060] All of the compositions and/or methods disclosed and claimed herein can be made and executed without undue experimentation in light of the present disclosure. While the compositions and methods of this invention have been described in terms of preferred embodiments, it may be apparent to those of skill in the art that variations may be applied to the compositions and/or methods and in the steps or in the sequence of steps of the method described herein without departing from the concept, spirit and scope of the invention. All such similar substitutes and modifications apparent to those skilled in the art are deemed to be within the spirit, scope and concept of the invention as defined by the appended claims.

### REFERENCES

[0061] U.S. Patent Application No. 20040146948: Compositions and Methods for Targeting Antigen-Presenting Cells with Antibody Single-Chain Variable Region Fragments.
[0062] U.S. Pat. No. 7,560,534: Molecular Conjugates Comprising Human Monoclonal Antibodies to Dendritic Cells.
[0063] U.S. Pat. No. 7,261,897: Fusion Proteins of Mycobacterium Tuberculosis.
[0064] 1. Dye, C., Scheele, S., Dolin, P., Pathania, V., and Raviglione, M. C. (1999) Jama 282, 677-686.
[0065] 2. Aziz, M. A., Wright, A., Laszlo, A., De Muynck, A., Portaels, F., Van Deun, A., Wells, C., Nunn, P., Blanc, L., and Raviglione, M. (2006) Lancet 368, 2142-2154.
[0066] 3. Colditz, G. A., Berkey, C. S., Mosteller, F., Brewer, T. F., Wilson, M. E., Burdick, E., and Fineberg, H. V. (1995) Pediatrics 96, 29-35.
[0067] 4. van Vliet, S. J., Garcia-Vallejo, J. J., and van Kooyk, Y. (2008) Immunol Cell Biol 86, 580-587.
[0068] 5. Banchereau, J., Briere, F., Caux, C., Davoust, J., Lebecque, S., Liu, Y. J., Pulendran, B., and Palucka, K. (2000) Annu Rev Immunol 18, 767-811.
[0069] 6. Cella, M., Engering, A., Pinet, V., Pieters, J., and Lanzavecchia, A. (1997) Nature 388, 782-787.
[0070] 7. Rescigno, M., Citterio, S., Thery, C., Rittig, M., Medaglini, D., Pozzi, G., Amigorena, S., and Ricciardi-Castagnoli, P. (1998) Proc Natl Acad Sci USA 95, 5229-5234.
[0071] 8. Austyn, J. M., Kupiec-Weglinski, J. W., Hankins, D. F., and Morris, P. J. (1988) J Exp Med 167, 646-651.
[0072] 9. Sallusto, F., and Lanzavecchia, A. (2000) Immunol Rev 177, 134-140.
[0073] 10. Locht, C., Rouanet, C., Hougardy, J. M., and Mascart, F. (2007) Expert Opin Biol Ther 7, 1665-1677.
[0074] 11. Hougardy, J. M., Schepers, K., Place, S., Drowart, A., Lechevin, V., Verscheure, V., Debrie, A. S., Doherty, T. M., Van Vooren, J. P., Locht, C., and Mascart, F. (2007) PLoS ONE 2, e926.
[0075] 12. Parida, S. K., and Kaufmann, S. H. (2010) Curr Opin Immunol 22, 374-384.

What is claimed is:

1. A method for increasing the effectiveness of antigen presentation by an antigen presenting cell (APC) comprising the steps of:
isolating and purifying a dendritic cell (DC)-specific antibody or fragment thereof to which one or more antigens or recombinant antigens are attached or conjugated to form an antibody-antigen complex, and
contacting the APC with the antibody-antigen complex under conditions wherein the antibody-antigen complex is processed and presented for T cell recognition of a Mycobacterium tuberculosis antigen.

2. The method of claim 1, wherein the APC comprises an isolated dendritic cell (DC), a peripheral blood mononuclear cell (PBMC), a monocyte, a B cell, a myeloid dendritic cell and combinations thereof that have been cultured in vitro with GM-CSF and IL-4, GM-CSF and interferon alpha, and antigen.

3. The method of claim 1, which the one or more antigens or recombinant antigens comprise M. tuberculosis antigens comprises at least one of SEQ ID NOS: 1, 2, 3, 4, 5, 71 to 135, 137, 139, 141, 143, 145, 147, 149, 151, 153, 155, 157, 159, 161, 163, 165, 167, 169, 171, 173, 175, 177, 179, 181, 183, 185, 187, 189, 191, 193, 195, 197, 199, 201, 203, 205, 207, 209, 211, 213, 215, 217, 219, or 211.

4. The method of claim 1, wherein the DC-specific antibody or fragment is selected from an anti-DCIR, αDCIR, MHC class I, MHC class II, CD1, CD2, CD3, CD4, CD8, CD11b, CD14, CD15, CD16, CD19, CD20, CD29, CD31, αCD40, CD43, CD44, CD45, CD54, CD56, CD57, CD58, CD83, CD86, CMRF-44, CMRF-56, DCIR, DC-ASPGR, CLEC-6, CD40, BDCA-2, MARCO, DEC-205, mannose receptor, αLangerin, DECTIN-1, B7-1, B7-2, IFN-γ receptor and IL-2 receptor, ICAM-1, Fcγ receptor, αLOX-1 or ASPGR.

5. The method of claim 1, wherein a nucleotide sequence for the DC-specific antibody or the antigen is selected from SEQ ID NOS: 6 to 70, 136, 138, 140, 142, 144, 146, 148, 150, 152, 154, 156, 158, 160, 162, 164, 166, 168, 170, 172, 174, 176, 178, 180, 182, 184, 186, 188, 190, 192, 194, 196, 198, 200, 202, 204, 206, 208, 210, 212, 214, 216, 218, or 220.

6. An immunostimulatory composition for generating an immune response, for prophylaxis, for therapy or any combination thereof against tuberculosis in a human or animal subject comprising:
an anti-dendritic cell (DC)-specific antibody or fragment thereof fused or conjugated to at least a portion of one or more M. tuberculosis antigens or antigenic peptides; and
a pharmaceutically acceptable carrier, wherein the conjugate is comprised in an amount effective to generate the immune response against tuberculosis.

7. The composition of claim 6, which the one or more antigens or recombinant antigens comprise M. tuberculosis antigens comprises at least one of SEQ ID NOS: 1, 2, 3, 4, 5, 71 to 135, 137, 139, 141, 143, 145, 147, 149, 151, 153, 155, 157, 159, 161, 163, 165, 167, 169, 171, 173, 175, 177, 179, 181, 183, 185, 187, 189, 191, 193, 195, 197, 199, 201, 203, 205, 207, 209, 211, 213, 215, 217, 219, or 211.

8. The composition of claim 6, wherein the DC-specific antibody or fragment is selected from an anti-DCIR, αDCIR, MHC class I, MHC class II, CD1, CD2, CD3, CD4, CD8, CD11b, CD14, CD15, CD16, CD19, CD20, CD29, CD31, αCD40, CD43, CD44, CD45, CD54, CD56, CD57, CD58, CD83, CD86, CMRF-44, CMRF-56, DCIR, DC-ASPGR, CLEC-6, CD40, BDCA-2, MARCO, DEC-205, mannose receptor, αLangerin, DECTIN-1, B7-1, B7-2, IFN-γ receptor and IL-2 receptor, ICAM-1, Fcγ receptor, αLOX-1 or ASPGR.

9. The composition of claim 6, wherein the DC-specific antibody or fragment comprises αDCIR, αLangerin, αLOX-1 or αCD40.

10. The composition of claim 6, wherein the DC-specific antibody is humanized.

11. The composition of claim 6, wherein the composition is administered to the human or animal subject by an oral route, a nasal route, topically or as an injection.

12. The composition of claim 11, wherein the injection is selected from the group consisting of subcutaneous, intravenous, intraperitoneal, intramuscular, and intravenous.

13. A vaccine composition comprising:
an anti-dendritic cell (DC)-specific antibody or fragment thereof fused or conjugated to at least a portion of one or more recombinant or natural M. tuberculosis antigens or antigenic peptides, wherein the antigenic peptides are representative of one or more epitopes of the one or more antigens implicated in tuberculosis; and
an optional pharmaceutically acceptable carrier or an adjuvant.

14. The composition of claim 13, further comprising a flexible linker between the DC-specific antibody or fragment thereof and the one or more antigens.

15. The composition of claim 13, wherein the one or more antigens or antigenic peptides are conjugated to a heavy-chain, a light-chain or both of the anti-dendritic cell (DC)-specific antibody.

16. The composition of claim 13, which the one or more antigens or recombinant antigens comprise M. tuberculosis antigens comprises at least one of SEQ ID NOS: 1, 2, 3, 4, 5, 71 to 135, 137, 139, 141, 143, 145, 147, 149, 151, 153, 155, 157, 159, 161, 163, 165, 167, 169, 171, 173, 175, 177, 179, 181, 183, 185, 187, 189, 191, 193, 195, 197, 199, 201, 203, 205, 207, 209, 211, 213, 215, 217, 219, or 211.

17. The composition of claim 13, wherein the DC-specific antibody or fragment is selected from an anti-DCIR, αDCIR, MHC class I, MHC class II, CD1, CD2, CD3, CD4, CD8, CD11b, CD14, CD15, CD16, CD19, CD20, CD29, CD31, αCD40, CD43, CD44, CD45, CD54, CD56, CD57, CD58, CD83, CD86, CMRF-44, CMRF-56, DCIR, DC-ASPGR, CLEC-6, CD40, BDCA-2, MARCO, DEC-205, mannose receptor, αLangerin, DECTIN-1, B7-1, B7-2, IFN-γ receptor and IL-2 receptor, ICAM-1, Fcγ receptor, αLOX-1 or ASPGR.

18. The composition of claim 13, wherein the DC-specific antibody or fragment comprises αDCIR, αLangerin, αLOX-1 or αCD40.

19. The composition of claim 13, wherein the DC-specific antibody is humanized.

20. The composition of claim 13, wherein the composition is administered to the human or animal subject by an oral route, a nasal route, topically or as an injection.

21. The composition of claim 20, wherein the injection is selected from the group consisting of subcutaneous, intravenous, intraperitoneal, intramuscular, and intravenous.

22. A tuberculosis vaccine comprising:
a dendritic cell (DC)-specific antibody or fragment thereof comprising αDCIR, αLangerin, αLOX-1 or αCD40 fused to one or more M. tuberculosis antigens selected from at least one of SEQ ID NOS: 1, 2, 3, 4, 5, 71 to 135, 137, 139, 141, 143, 145, 147, 149, 151, 153, 155, 157, 159, 161, 163, 165, 167, 169, 171, 173, 175, 177, 179, 181, 183, 185, 187, 189, 191, 193, 195, 197, 199, 201, 203, 205, 207, 209, 211, 213, 215, 217, 219, or 211, wherein the antigens or the antigenic peptides are conjugated to a heavy chain of the DC-specific antibody via one or more flexible linkers or by at least one half of a cohesin-dockerin pair; and
an optional at least one of a pharmaceutically acceptable carrier or an adjuvant.

23. A method for increasing effectiveness of one or more dendritic cells (DCs) comprising the steps of:
isolating the DCs from a patient;
exposing the DCs to activating amounts of a vaccine comprising a dendritic cell (DC)-specific antibody or fragment thereof loaded, fused or conjugated to one or more antigens or antigenic M. tuberculosis antigens selected from at least one of SEQ ID NOS: 1, 2, 3, 4, 5, 71 to 135, 137, 139, 141, 143, 145, 147, 149, 151, 153, 155, 157, 159, 161, 163, 165, 167, 169, 171, 173, 175, 177, 179, 181, 183, 185, 187, 189, 191, 193, 195, 197, 199, 201, 203, 205, 207, 209, 211, 213, 215, 217, 219, or 211, wherein the antigens or the antigenic peptides are conjugated to a heavy chain, a light chain or both of the DC-specific antibody via one or more flexible linkers; and an optional pharmaceutically acceptable carrier or an adjuvant wherein the DC-specific antibody or fragment comprises αDCIR, αLangerin, αLOX-1 or αCD40; and
reintroducing the antigen-loaded and activated DCs into the patient.

24. A method for a treatment, a prophylaxis or a combination thereof against tuberculosis in a human subject comprising the steps of:
identifying the human subject in need of the treatment, the prophylaxis or a combination thereof against tuberculosis; and
administering a vaccine composition comprising:
an anti-dendritic cell (DC)-specific antibody or fragment thereof fused or conjugated to at least a portion of one or more recombinant or natural M. tuberculosis antigens or antigenic peptides, wherein the antigenic peptides are representative of one or more epitopes of the one or more antigens implicated in tuberculosis and an optional pharmaceutically acceptable carrier or an adjuvant.

25. The method of claim 24, further comprising a flexible linker between the DC-specific antibody or fragment thereof and the one or more antigens.

26. The method of claim 24, wherein the one or more antigens or antigenic peptides are conjugated to a heavy-chain, a light-chain or both of the anti-dendritic cell (DC)-specific antibody.

27. The method of claim 24, wherein the one or more M. tuberculosis antigens are selected from at least one of SEQ ID NOS: 1, 2, 3, 4, 5, 71 to 135, 137, 139, 141, 143, 145, 147, 149, 151, 153, 155, 157, 159, 161, 163, 165, 167, 169, 171, 173, 175, 177, 179, 181, 183, 185, 187, 189, 191, 193, 195, 197, 199, 201, 203, 205, 207, 209, 211, 213, 215, 217, 219, or 211.

28. The method of claim 24, wherein the DC-specific antibody or fragment is selected from an anti-DCIR, αDCIR, MHC class I, MHC class II, CD1, CD2, CD3, CD4, CD8, CD11b, CD14, CD15, CD16, CD19, CD20, CD29, CD31, αCD40, CD43, CD44, CD45, CD54, CD56, CD57, CD58, CD83, CD86, CMRF-44, CMRF-56, DCIR, DC-ASPGR, CLEC-6, CD40, BDCA-2, MARCO, DEC-205, mannose receptor, αLangerin, DECTIN-1, B7-1, B7-2, IFN-γ receptor and IL-2 receptor, ICAM-1, Fcγ receptor, αLOX-1 or ASPGR.

29. The method of claim 24, wherein the DC-specific antibody or fragment comprises αDCIR, αLangerin, αLOX-1 or αCD40.

30. The method of claim 24, wherein the DC-specific antibody is humanized.

31. The method of claim 24, wherein the composition is administered to the human or animal subject by an oral route, a nasal route, topically or as an injection.

32. The method of claim 31, wherein the injection is selected from the group consisting of subcutaneous, intravenous, intraperitoneal, intramuscular, and intravenous.

33. An immunostimulatory composition for generating an immune response, for a prophylaxis, a therapy or any combination thereof against tuberculosis in a human or animal subject comprising:
an anti-dendritic cell (DC)-specific antibody or fragment thereof fused or conjugated to at least a portion of one or more M. tuberculosis antigens;
at least one Toll-Like Receptor (TLR) agonist which is selected from the group consisting of TLR1, TLR2, TLR3, TLR4, TLR5, TLR6, TLR7, and TLR8 agonists; and
a pharmaceutically acceptable carrier, wherein the conjugate is comprised in an amount effective to generate the immune response against tuberculosis.

34. The composition of claim 33, wherein the one or more M. tuberculosis antigens are selected from at least one of SEQ ID NOS: 1, 2, 3, 4, 5, 71 to 135, 137, 139, 141, 143, 145, 147, 149, 151, 153, 155, 157, 159, 161, 163, 165, 167, 169, 171, 173, 175, 177, 179, 181, 183, 185, 187, 189, 191, 193, 195, 197, 199, 201, 203, 205, 207, 209, 211, 213, 215, 217, 219, or 211.

35. The composition of claim 33, wherein the DC-specific antibody or fragment comprises αDCIR, αLangerin, αLOX-1 or αCD40.

36. A tuberculosis vaccine comprising:
an anti-dendritic cell (DC)-specific antibody or fragment thereof fused or conjugated to at least a portion of one or more recombinant or natural M. tuberculosis antigens or antigenic peptides, wherein the antigenic peptides are representative of one or more epitopes of the one or more antigens implicated in tuberculosis;
at least one Toll-Like Receptor (TLR) agonist which is selected from the group consisting of TLR1, TLR2, TLR3, TLR4, TLR5, TLR6, TLR7, and TLR8 agonists; and
one or more optional pharmaceutically acceptable carriers and adjuvants.

37. The composition of claim 36, wherein the DC-specific antibody is humanized.

38. The composition of claim 36, wherein the antigen is selected from at least one of SEQ ID NOS: 71 to 135, 137, 139, 141, 143, 145, 147, 149, 151, 153, 155, 157, 159, 161, 163, 165, 167, 169, 171, 173, 175, 177, 179, 181, 183, 185, 187, 189, 191, 193, 195, 197, 199, 201, 203, 205, 207, 209, 211, 213, 215, 217, 219, or 211.

39. A method for a treatment, a prophylaxis or a combination thereof against tuberculosis in a human subject comprising the steps of:
identifying the human subject in need of the treatment, the prophylaxis or a combination thereof against tuberculosis; and
administering a vaccine composition comprising:
an anti-dendritic cell (DC)-specific antibody or fragment thereof fused or conjugated to at least a portion of one or more recombinant or natural M. tuberculosis antigens or antigenic peptides, wherein the antigenic peptides are representative of one or more epitopes of the one or more antigens implicated in tuberculosis; and
at least one Toll-Like Receptor (TLR) agonist which is selected from the group consisting of TLR1, TLR2, TLR3, TLR4, TLR5, TLR6, TLR7, and TLR8 agonists; and
one or more optional pharmaceutically acceptable carriers and adjuvants.

40. The method of claim 39, further comprising a flexible linker between the DC-specific antibody or fragment thereof and the one or more antigens.

41. The method of claim 39, wherein the one or more antigens or antigenic peptides are conjugated to a heavy-chain, a light-chain or both of the anti-dendritic cell (DC)-specific antibody.

42. The method of claim 39, wherein the one or more M. tuberculosis antigens are selected from the group consisting of SEQ ID NO: 1, SEQ ID NO: 2, SEQ ID NO: 3, SEQ ID NO: 4, SEQ ID NO: 5, and any combinations thereof.

43. The method of claim 39, wherein the DC-specific antibody or fragment comprises αDCIR, αLangerin, αLOX-1 or αCD40.

44. The method of claim 39, wherein the DC-specific antibody is humanized.

The application's sequence listing, which the Patent Office published only in electronic form, follows.

SEQUENCE LISTING (221 sequences)

SEQ ID NO: 1 - protein, 95 aa, Mycobacterium tuberculosis
MTEQQWNFAGIEAAASAIQGNVTSIHSLLDEGKQSLTKLAAAWGGSGSEAYQGVQQKWDATATELNNALQNLARTISEAGQAMASTEGNVTGMFA

SEQ ID NO: 2 - protein, 96 aa, Mycobacterium tuberculosis
MSQIMYNYPAMLGHAGDMAGYAGTLQSLGAEIAVEQAALQSAWQGDTGITYQAWQAQWNQAMEDLVRAYHAMSSTHEANTMAMMARDTAEAAKWGG

SEQ ID NO: 3 - protein, 199 aa, Mycobacterium tuberculosis
MAENSNIDDIKAPLLAALGAADLALATVNELITNLRERAEETRTDTRSRVEESRARLTKLQEDLPEQLTELREKFTAEELRKAAEGYLEAATSRYNELVERGEAALERLRSQQSFEEVSARAEGYVDQAVELTQEALGTVASQTRAVGERAAKLVGIELPKKAAPAKKAAPAKKAAPAKKAAAKKAPAKKAAAKKVTQK

SEQ ID NO: 4 - protein, 228 aa, Mycobacterium tuberculosis
MRIKIFMLVTAVVLLCCSGVATAAPKTYCEELKGTDTGQACQIQMSDPAYNINISLPSYYPDQKSLENYIAQTRDKFLSAATSSTPREAPYELNITSATYQSAIPPRGTQAVVLKVYQNAGGTHPTTTYKAFDWDQAYRKPITYDTLWQADTDPLPVVFPIVQGELSKQTGQQVSIAPNAGLDPVNYQNFAVTNDGVIFFFNPGELLPEAAGPTQVLVPRSAIDSMLA

SEQ ID NO: 5 - protein, 325 aa, Mycobacterium tuberculosis
MTDVSRKIRAWGRRLMIGTAAAVVLPGLVGLAGGAATAGAFSRPGLPVEYLQVPSPSMGRDIKVQFQSGGNNSPAVYLLDGLRAQDDYNGWDINTPAFEWYYQSGLSIVMPVGGQSSFYSDWYSPACGKAGCQTYKWETFLTSELPQWLSANRAVKPTGSAAIGLSMAGSSAMILAAYHPQQFIYAGSLSALLDPSQGMGPSLIGLAMGDAGGYKAADMWGPSSDPAWERNDPTQQIPKLVANNTRLWVYCGNGTPNELGGANIPAEFLENFVRSSNLKFQDAYNAAGGHNAVFNFPPNGTHSWEYWGAQLNAMKGDLQSSLGAG

SEQ ID NO: 6 - DNA, 1409 bp, Artificial Sequence
  Description of Artificial Sequence: Synthetic polynucleotide
atgggcaggcttacttcttcattcttgctactgattgtccctgcatatgtcctgtcccaggttactctgaaagagtctggccctgggatattgcagccctcccagaccctcagtctgacctgttctttctctgggttttcactgagcacttctggtatgagtgtaggctggattcgtcagccttcagggaagggtctggagtggctggctcacatttggtggaatgatgataagtactataatccagtcctgaaaagccggctcacaatctccaaggagacctccaacaaccaggtattcctcaagatcgccagtgtggtctctgcagatactgccacatactactgtgctcgattctatggtaactgtcttgactactggggccaaggcaccactctcacagtctcctcggccaaaacaaagggcccatccgtcttccccctggcgccctgctccaggagcacctccgagagcacagccgccctgggctgcctggtcaaggactacttccccgaaccggtgacggtgtcgtggaactcaggcgccctgaccagcggcgtgcacaccttcccggctgtcctacagtcctcaggactctactccctcagcagcgtggtgaccgtgccctccagcagcttgggcacgaagacctacacctgcaacgtagatcacaagcccagcaacaccaaggtggacaagagagttgagtccaaatatggtcccccatgcccaccctgcccagcacctgagttcgaagggggaccatcagtcttcctgttccccccaaaacccaaggacactctcatgatctcccggacccctgaggtcacgtgcgtggtggtggacgtgagccaggaagaccccgaggtccagttcaactggtacgtggatggcgtggaggtgcataatgccaagacaaagccgcgggaggagcagttcaacagcacgtaccgtgtggtcagcgtcctcaccgtcctgcaccaggactggctgaacggcaaggagtacaagtgcaaggtctccaacaaaggcctcccgtcctccatcgagaaaaccatctccaaagccaaagggcagccccgagagccacaggtgtacaccctgcccccatcccaggaggagatgaccaagaaccaggtcagcctgacctgcctggtcaaaggcttctaccccagcgacatcgccgtggagtgggagagcaatgggcagccggagaacaactacaagaccacgcctcccgtgctggactccgacggctccttcttcctctacagcaggctaaccgtggacaagagcaggtggcaggaggggaatgtcttctcatgctccgtgatgcatgaggctctgcacaaccactacacacagaagagcctctccctgtctctgggtaaagctagctgattaattaa

SEQ ID NO: 7 - DNA, 705 bp, Artificial Sequence
  Description of Artificial Sequence: Synthetic polynucleotide
atgatgtcctctgctcagttccttggtctcctgttgctctgttttcaaggtaccagatgtgatatccagatgacacagactacatcctccctgtctgcctctctgggagacagagtcaccatcagttgcagggcaagtcaggacattagcaattatttaaactggtatcagcagaaaccagatggaactgttaaactcctgatctactacacatcaatattacaattaggagtcccatcaagattcagtggcagtgggtctgaaacagattattctctcaccattagcaacctggagcaagaagatattgccacttacttttgccaacagggtgattcgcttccattcacgttcggctcggggacaaagctcgagatcaaacgaactgtggctgcaccatctgtcttcatcttcccgccatctgatgagcagttgaaatctggaactgcctctgttgtgtgcctgctgaataacttctatcccagagaggccaaagtacagtggaaggtggataacgccctccaatcgggtaactcccaggagagtgtcacagagcaggacagcaaggacagcacctacagcctcagcagcaccctgacgctgagcaaagcagactacgagaaacacaaagtctatgcctgcgaagtcacccatcagggcctgagctcgcccgtcacaaagagcttcaacaggggagagtgttag

SEQ ID NO: 8 - DNA, 1403 bp, Artificial Sequence
  Description of Artificial Sequence: Synthetic polynucleotide
atgagagcgctgattcttttgtgcctgttcacagcctttcctggtatcctgtctgatgtgcagcttcaggagtcaggacctgacctggtgaaaccttctcagtcactttcactcacctgcactgtcactggctactccatcaccagtggttatagctggcactggatccggcagtttccaggaaacaaactggaatggatgggctacatactcttcagtggtagcactaactacaacccatctctgaaaagtcgaatctctatcactcgagacacatccaagaaccagttcttcctgcagttgaattctgtgactactgaggacacagccacatatttctgtgcaagatctaactatggttcctttgcttcctggggccaagggactctggtcactgtctctgcagccaaaacaacgggcccatccgtcttccccctggcgccctgctccaggagcacctccgagagcacagccgccctgggctgcctggtcaaggactacttccccgaaccggtgacggtgtcgtggaactcaggcgccctgaccagcggcgtgcacaccttcccggctgtcctacagtcctcaggactctactccctcagcagcgtggtgaccgtgccctccagcagcttgggcacgaagacctacacctgcaacgtagatcacaagcccagcaacaccaaggtggacaagagagttgagtccaaatatggtcccccatgcccaccctgcccagcacctgagttcgaagggggaccatcagtcttcctgttccccccaaaacccaaggacactctcatgatctcccggacccctgaggtcacgtgcgtggtggtggacgtgagccaggaagaccccgaggtccagttcaactggtacgtggatggcgtggaggtgcataatgccaagacaaagccgcgggaggagcagttcaacagcacgtaccgtgtggtcagcgtcctcaccgtcctgcaccaggactggctgaacggcaaggagtacaagtgcaaggtctccaacaaaggcctcccgtcctccatcgagaaaaccatctccaaagccaaagggcagccccgagagccacaggtgtacaccctgcccccatcccaggaggagatgaccaagaaccaggtcagcctgacctgcctggtcaaaggcttctaccccagcgacatcgccgtggagtgggagagcaatgggcagccggagaacaactacaagaccacgcctcccgtgctggactccgacggctccttcttcctctacagcaggctaaccgtggacaagagcaggtggcaggaggggaatgtcttctcatgctccgtgatgcatgaggctctgcacaaccactacacacagaagagcctctccctgtctctgggtaaagctagctgattaattaa

SEQ ID NO: 9 - DNA, 708 bp, Artificial Sequence
  Description of Artificial Sequence: Synthetic polynucleotide
atggattttcaagtgcagattttcagcttcctgctaatcagtgcctcagtcataatatccagaggacaaattgttctcacccagtctccagcaatcatgtctgcatctccaggggagaaggtcaccatgacctgcagtgccagctcaagtgtaagtcacatgcactggtaccagcagaagtcaggcacttcccccaaaagatggatttatgacacatccagactggcttctggagtccctgctcgcttcagtggcagtgggtctgggacctcttactctctcacaatcagcagcatggaggctgaagatgctgccacttattactgccagcagtggagtagtcacccatggtcgttcggtggaggcaccaaactcgagatcaaacgaactgtggctgcaccatctgtcttcatcttcccgccatctgatgagcagttgaaatctggaactgcctctgttgtgtgcctgctgaataacttctatcccagagaggccaaagtacagtggaaggtggataacgccctccaatcgggtaactcccaggagagtgtcacagagcaggacagcaaggacagcacctacagcctcagcagcaccctgacgctgagcaaagcagactacgagaaacacaaagtctatgcctgcgaagtcacccatcagggcctgagctcgcccgtcacaaagagcttcaacaggggagagtgttag

SEQ ID NO: 10 - DNA, 1415 bp, Artificial Sequence
  Description of Artificial Sequence: Synthetic polynucleotide
atggcttgggtgtggaccttgctattcctgatggcagctgcccaaagtgcccaagcacagatccagttggtgcagtctggacctgagctgaagaagcctggagagacagtcaagatctcctgcaaggcttctgggtataccttcacaaactatggaatgaactgggtgaagcaggttccaggaaaaggtttaaggtggatgggctggatggacaccttcactggagagccaacatatgctgatgacttcaagggacggtttgccttctctttggaaacctctgccagcactgcctatttgcagatcaacagcctcaaaaatgaggacacggctacttatttctgtgcaagaggggggattttacgactcaactactttgactactggggccaaggcaccactctcacagtctcctcagccaaaacgaagggcccatccgtcttccccctggcgccctgctccaggagcacctccgagagcacagccgccctgggctgcctggtcaaggactacttccccgaaccggtgacggtgtcgtggaactcaggcgccctgaccagcggcgtgcacaccttcccggctgtcctacagtcctcaggactctactccctcagcagcgtggtgaccgtgccctccagcagcttgggcacgaagacctacacctgcaacgtagatcacaagcccagcaacaccaaggtggacaagagagttgagtccaaatatggtcccccatgcccaccctgcccagcacctgagttcgaagggggaccatcagtcttcctgttccccccaaaacccaaggacactctcatgatctcccggacccctgaggtcacgtgcgtggtggtggacgtgagccaggaagaccccgaggtccagttcaactggtacgtggatggcgtggaggtgcataatgccaagacaaagccgcgggaggagcagttcaacagcacgtaccgtgtggtcagcgtcctcaccgtcctgcaccaggactggctgaacggcaaggagtacaagtgcaaggtctccaacaaaggcctcccgtcctccatcgagaaaaccatctccaaagccaaagggcagccccgagagccacaggtgtacaccctgcccccatcccaggaggagatgaccaagaaccaggtcagcctgacctgcctggtcaaaggcttctaccccagcgacatcgccgtggagtgggagagcaatgggcagccggagaacaactacaagaccacgcctcccgtgctggactccgacggctccttcttcctctacagcaggctaaccgtggacaagagcaggtggcaggaggggaatgtcttctcatgctccgtgatgcatgaggctctgcacaaccactacacacagaagagcctctccctgtctctgggtaaagctagctgattaattaa

SEQ ID NO: 11 - DNA, 705 bp, Artificial Sequence
  Description of Artificial Sequence: Synthetic polynucleotide
atgaagtttccttctcaacttctgctcttactgctgtttggaatcccaggcatgatatgtgacatccagatgacacaatcttcatcctccttttctgtatctctaggagacagagtcaccattacttgcaaggcaagtgaggacatatataatcggttaggctggtatcagcagaaaccaggaaatgctcctaggctcttaatatctggtgcaaccagtttggaaactggggttccttcaagattcagtggcagtggatctggaaaggattacgctctcagcattaccagtcttcagactgaagatcttgctacttattactgtcaacagtgttggacttctccgtacacgttcggaggggggaccaagctcgagatcaaacgaactgtggctgcaccatctgtcttcatcttcccgccatctgatgagcagttgaaatctggaactgcctctgttgtgtgcctgctgaataacttctatcccagagaggccaaagtacagtggaaggtggataacgccctccaatcgggtaactcccaggagagtgtcacagagcaggacagcaaggacagcacctacagcctcagcagcaccctgacgctgagcaaagcagactacgagaaacacaaagtctatgcctgcgaagtcacccatcagggcctgagctcgcccgtcacaaagagcttcaacaggggagagtgttag

SEQ ID NO: 12 - DNA, 1398 bp, Artificial Sequence
  Description of Artificial Sequence: Synthetic polynucleotide
atgggatggagctggatctttctctttctcttgtcaggaactggaggtgtcctctctgaggtccagctgcaacagtctggacctgagctggtgaagcctggggcttcagtgaagatgtcctgcaaggcttctggatacaccttcactgactactacatgaagtgggtgaagcagagccatggaaagagccttgagtggattggagatattaatcctaactatggtgatactttctacaaccagaagttcgagggcaaggccacattgactgtagacaaatcctccaggacagcctacatgcagctcaacagcctgacatctgaggactctgcagtctattattgtggaagaggggactatggatacttcgatgtctggggcgcagggaccacggtcaccgtctcctcagccaaaacaaagggcccatccgtcttccccctggcgccctgctccaggagcacctccgagagcacagccgccctgggctgcctggtcaaggactacttccccgaaccggtgacggtgtcgtggaactcaggcgccctgaccagcggcgtgcacaccttcccggctgtcctacagtcctcaggactctactccctcagcagcgtggtgaccgtgccctccagcagcttgggcacgaagacctacacctgcaacgtagatcacaagcccagcaacaccaaggtggacaagagagttgagtccaaatatggtcccccatgcccaccctgcccagcacctgagttcgaagggggaccatcagtcttcctgttccccccaaaacccaaggacactctcatgatctcccggacccctgaggtcacgtgcgtggtggtggacgtgagccaggaagaccccgaggtccagttcaactggtacgtggatggcgtggaggtgcataatgccaagacaaagccgcgggaggagcagttcaacagcacgtaccgtgtggtcagcgtcctcaccgtcctgcaccaggactggctgaacggcaaggagtacaagtgcaaggtctccaacaaaggcctcccgtcctccatcgagaaaaccatctccaaagccaaagggcagccccgagagccacaggtgtacaccctgcccccatcccaggaggagatgaccaagaaccaggtcagcctgacctgcctggtcaaaggcttctaccccagcgacatcgccgtggagtgggagagcaatgggcagccggagaacaactacaagaccacgcctcccgtgctggactccgacggctccttcttcctctacagcaggctaaccgtggacaagagcaggtggcaggaggggaatgtcttctcatgctccgtgatgcatgaggctctgcacaaccactacacacagaagagcctctccctgtctctgggtaaagctagctga

SEQ ID NO: 13 - DNA, 705 bp, Artificial Sequence
  Description of Artificial Sequence: Synthetic polynucleotide
atggagacacattctcaggtctttgtatacatgttgctgtggttgtctggtgttgaaggagacattgtgatgacccagtctcacaaattcatgtccacatcagtaggagacagggtcagcatcacctgcaaggccagtcaggatgtgggtactgctgtagcctggtatcaacagaaaccagggcaatctcctaaactactgatttactgggcatccacccggcacactggagtccctgatcgcttcacaggcagtggatctgggacagatttcactctcaccattaacaatgtgcagtctgaagacttggcagattatttctgtcagcaatatagcagcaatccgtacatgttcggaggggggaccaagctcgagatcaaacgaactgtggctgcaccatctgtcttcatcttcccgccatctgatgagcagttgaaatctggaactgcctctgttgtgtgcctgctgaataacttctatcccagagaggccaaagtacagtggaaggtggataacgccctccaatcgggtaactcccaggagagtgtcacagagcaggacagcaaggacagcacctacagcctcagcagcaccctgacgctgagcaaagcagactacgagaaacacaaagtctatgcctgcgaagtcacccatcagggcctgagctcgcccgtcacaaagagcttcaacaggggagagtgttag

SEQ ID NO: 14 - DNA, 1413 bp, Artificial Sequence
  Description of Artificial Sequence: Synthetic polynucleotide
atgggatggagctggatctttctctttctcctgtcaggaactgcaggtgtcctctctgaggtccagctgcaacagtctggacctgagttggtgaagcctggggcttcagtgaagatatcctgcaagacttctggatacacattcactgaatacaccatgcactgggtgaggcagagccatggaaagagccttgagtggattggaggtattaatcctatcaatggtggtcctacctacaaccagaagttcaagggcaaggccacattgactgttgacaagtcctccagcacagcctacatggagctccgcagcctgacatctgaggactctgcagtctattactgtgcaagatgggactatggtagtcgagatgttatggactactggggtcaaggaacctcagtcaccgtctcctcagccaaaacgaagggcccatccgtcttccccctggcgccctgctccaggagcacctccgagagcacagccgccctgggctgcctggtcaaggactacttccccgaaccggtaccggtgacggtgtcgtggaactcaggcgccctgaccagcggcgtgcacaccttcccggctgtcctacagtcctcaggactctactccctcagcagcgtggtgaccgtgccctccagcagcttgggcacgaagacctacacctgcaacgtagatcacaagcccagcaacaccaaggtggacaagagagttgagtccaaatatggtcccccatgcccaccctgcccagcacctgagttcgaagggggaccatcagtcttcctgttccccccaaaacccaaggacactctcatgatctcccggacccctgaggtcacgtgcgtggtggtggacgtgagccaggaagaccccgaggtccagttcaactggtacgtggatggcgtggaggtgcataatgccaagacaaagccgcgggaggagcagttcaacagcacgtaccgtgtggtcagcgtcctcaccgtcctgcaccaggactggctgaacggcaaggagtacaagtgcaaggtctccaacaaaggcctcccgtcctccatcgagaaaaccatctccaaagccaaagggcagccccgagagccacaggtgtacaccctgcccccatcccaggaggagatgaccaagaaccaggtcagcctgacctgcctggtcaaaggcttctaccccagcgacatcgccgtggagtgggagagcaatgggcagccggagaacaactacaagaccacgcctcccgtgctggactccgacggctccttcttcctctacagcaggctaaccgtggacaagagcaggtggcaggaggggaatgtcttctcatgctccgtgatgcatgaggctctgcacaaccactacacacagaagagcctctccctgtctctgggtaaagctagctga

SEQ ID NO: 15 - DNA, 705 bp, Artificial Sequence
  Description of Artificial Sequence: Synthetic polynucleotide
atggaatcacagactctggtcttcatatccatactgctctggttatatggtgctgatgggaacattgtaatgactcaatctcccaaatccatgtccatgtcagtaggggagagggtcaccttgagctgcaaggccagtgagaatgtgggaacttatgtatcctggtatcaacagagaccagaacagtctccaaaactgctgatatacggggcatccaaccggtacactggggtccccgatcgcttcacaggcagtggatctgcaacagatttcactctgaccatcagcagtgtgcaggctgaggaccttgcagattatcactgtggacagacttacagctatatattcacgttcggctcggggacaaagctcgagatcaaacgaactgtggctgcaccatctgtcttcatcttcccgccatctgatgagcagttgaaatctggaactgcctctgttgtgtgcctgctgaataacttctatcccagagaggccaaagtacagtggaaggtggataacgccctccaatcgggtaactcccaggagagtgtcacagagcaggacagcaaggacagcacctacagcctcagcagcaccctgacgctgagcaaagcagactacgagaaacacaaagtctatgcctgcgaagtcacccatcagggcctgagctcgcccgtcacaaagagcttcaacaggggagagtgttag

SEQ ID NO: 16 - DNA, 1404 bp, Artificial Sequence
  Description of Artificial Sequence: Synthetic polynucleotide
atgggatggagccggatctttctcttcctcctgtcaataactgcaggtgtccattgccaggtccaggtgcagcagtcgggacctgagttggtgaagcctggggcctcagtgaagatttcctgcaaagcctctggcgacgcattcagtagttcttggatgaactgggtgaagcagaggcctggacagggtcttgagtggattggacggatttatcttggagatggagatattaattacaatgggaagttcaagggcagggccacactgactgcagacaaatcctccagcacagcctacatgcagctcagcagcctgacctctgtggactctgcggtctatttctgcgcgaggcagctcgggctatggtatgttatggactactggggtcaaggaacctcagtcaccgtctcctcagccaaaacaaagggcccatccgtcttccccctggcgccctgctccaggagcacctccgagagcacagccgccctgggctgcctggtcaaggactacttccccgaaccggtgacggtgtcgtggaactcaggcgccctgaccagcggcgtgcacaccttcccggctgtcctacagtcctcaggactctactccctcagcagcgtggtgaccgtgccctccagcagcttgggcacgaagacctacacctgcaacgtagatcacaagcccagcaacaccaaggtggacaagagagttgagtccaaatatggtcccccatgcccaccctgcccagcacctgagttcgaagggggaccatcagtcttcctgttccccccaaaacccaaggacactctcatgatctcccggacccctgaggtcacgtgcgtggtggtggacgtgagccaggaagaccccgaggtccagttcaactggtacgtggatggcgtggaggtgcataatgccaagacaaagccgcgggaggagcagttcaacagcacgtaccgtgtggtcagcgtcctcaccgtcctgcaccaggactggctgaacggcaaggagtacaagtgcaaggtctccaacaaaggcctcccgtcctccatcgagaaaaccatctccaaagccaaagggcagccccgagagccacaggtgtacaccctgcccccatcccaggaggagatgaccaagaaccaggtcagcctgacctgcctggtcaaaggcttctaccccagcgacatcgccgtggagtgggagagcaatgggcagccggagaacaactacaagaccacgcctcccgtgctggactccgacggctccttcttcctctacagcaggctaaccgtggacaagagcaggtggcaggaggggaatgtcttctcatgctccgtgatgcatgaggctctgcacaaccactacacacagaagagcctctccctgtctctgggtaaagctagctga

SEQ ID NO: 17 - DNA, 705 bp, Artificial Sequence
  Description of Artificial Sequence: Synthetic polynucleotide
atgagtgtgcccactcaggtcctggggttgctgctgctgtggcttacaggtgccagatgtgacatccagatggctcagtctccagcctccctatctgcatctgtgggagaaactgtcaccatcacatgtcgagcaagtgagaatatttacagttatttagcatggtatcagcagaaacagggaaaatctcctcagctcctggtctataatgcaaaaaccttagcagaaggtgtgccatcaaggttcagtggcagtggatcaggcacacagttttctctgaagatcaacagcctgcagcctgaagattttgggagttattactgtcaacatcattatggttttccgtggacgttcggtggaggcaccaagctcgagatcaaacgaactgtggctgcaccatctgtcttcatcttcccgccatctgatgagcagttgaaatctggaactgcctctgttgtgtgcctgctgaataacttctatcccagagaggccaaagtacagtggaaggtggataacgccctccaatcgggtaactcccaggagagtgtcacagagcaggacagcaaggacagcacctacagcctcagcagcaccctgacgctgagcaaagcagactacgagaaacacaaagtctatgcctgcgaagtcacccatcagggcctgagctcgcccgtcacaaagagcttcaacaggggagagtgttag

SEQ ID NO: 18 - DNA, 1395 bp, Artificial Sequence
  Description of Artificial Sequence: Synthetic polynucleotide
atgaacttcgggctcagcttgattttccttgtcctcattttaaaaggtgtccagtgtgaggtgcagctggtggagtctgggggagacttagtgaagcctggagggtccctgaaactctcctgtgcagcctctggattcactttcagtagctatggcatgtcttgggttcgccagactccagacaagaggctggagtgggtcgcagtcattagtagtggtggaagttccaccttctatccagacagtgtgaaggggcgattcaccatctccagagacaatgccaagaacaccctgtacctgcaaatgagcagtctgaagtctgaggacacagccgtgtattactgttcaagaggaggttactactttgactactggggccaaggcaccactctcacagtctccgcagccaaaacaaagggcccatccgtcttccccctggcgccctgctccaggagcacctccgagagcacagccgccctgggctgcctggtcaaggactacttccccgaaccggtgacggtgtcgtggaactcaggcgccctgaccagcggcgtgcacaccttcccggctgtcctacagtcctcaggactctactccctcagcagcgtggtgaccgtgccctccagcagcttgggcacgaagacctacacctgcaacgtagatcacaagcccagcaacaccaaggtggacaagagagttgagtccaaatatggtcccccatgcccaccctgcccagcacctgagttcgaagggggaccatcagtcttcctgttccccccaaaacccaaggacactctcatgatctcccggacccctgaggtcacgtgcgtggtggtggacgtgagccaggaagaccccgaggtccagttcaactggtacgtggatggcgtggaggtgcataatgccaagacaaagccgcgggaggagcagttcaacagcacgtaccgtgtggtcagcgtcctcaccgtcctgcaccaggactggctgaacggcaaggagtacaagtgcaaggtctccaacaaaggcctcccgtcctccatcgagaaaaccatctccaaagccaaagggcagccccgagagccacaggtgtacaccctgcccccatcccaggaggagatgaccaagaaccaggtcagcctgacctgcctggtcaaaggcttctaccccagcgacatcgccgtggagtgggagagcaatgggcagccggagaacaactacaagaccacgcctcccgtgctggactccgacggctccttcttcctctacagcaggctaaccgtggacaagagcaggtggcaggaggggaatgtcttctcatgctccgtgatgcatgaggctctgcacaaccactacacacagaagagcctctccctgtctctgggtaaagctagctga

SEQ ID NO: 19 - DNA, 705 bp, Artificial Sequence
  Description of Artificial Sequence: Synthetic polynucleotide
atgaggttccaggttcaggttctggggctccttctgctctggatatcaggtgcccagtgtgatgtccagataacccagtctccatcttatcttgctgcatctcctggagaaaccattactattaattgcagggcaagcaagaccattagcaaatatttagcctggtatcaagagaaacctgagaaaactgataagcttcttatctactctggatccactttgcaatctggaattccatcaaggttcagtggcagtggatctggtacagatttcactctcaccatcagtggcctggagcctgaagattttgcaatgtattactgtcaacagcataatgaatacccgtggacgttcggtggaggcaccaagctcgagatcaaacgaactgtggctgcaccatctgtcttcatcttcccgccatctgatgagcagttgaaatctggaactgcctctgttgtgtgcctgctgaataacttctatcccagagaggccaaagtacagtggaaggtggataacgccctccaatcgggtaactcccaggagagtgtcacagagcaggacagcaaggacagcacctacagcctcagcagcaccctgacgctgagcaaagcagactacgagaaacacaaagtctatgcctgcgaagtcacccatcagggcctgagctcgcccgtcacaaagagcttcaacaggggagagtgttag

SEQ ID NO: 20 - DNA, 1389 bp, Artificial Sequence
  Description of Artificial Sequence: Synthetic polynucleotide
atgggatggagctggatctttctctttctcctgtcaggaactgcaggtgtcctctctgaggtccagctgcaacagtctggacctgagctggtgaagcctggggcttcagtgaagatatcctgcaaggcttctggttactcattcactggctactacatgcactgggtgaagcaaagccatgtaaagagccttgagtggattggacgtattaatccttacaatggtgctactagctacaaccagaatttcaaggacaaggccagcttgactgtagataagtcctccagcacagcctacatggagctccacagcctgacatctgaggactctgcagtctattactgtgcaagagaggactacgtctactggggccaaggcaccactctcacagtctcctcagccaaaacgaagggcccatccgtcttccccctggcgccctgctccaggagcacctccgagagcacagccgccctgggctgcctggtcaaggactacttccccgaaccggtgacggtgtcgtggaactcaggcgccctgaccagcggcgtgcacaccttcccggctgtcctacagtcctcaggactctactccctcagcagcgtggtgaccgtgccctccagcagcttgggcacgaagacctacacctgcaacgtagatcacaagcccagcaacaccaaggtggacaagagagttgagtccaaatatggtcccccatgcccaccctgcccagcacctgagttcgaagggggaccatcagtcttcctgttccccccaaaacccaaggacactctcatgatctcccggacccctgaggtcacgtgcgtggtggtggacgtgagccaggaagaccccgaggtccagttcaactggtacgtggatggcgtggaggtgcataatgccaagacaaagccgcgggaggagcagttcaacagcacgtaccgtgtggtcagcgtcctcaccgtcctgcaccaggactggctgaacggcaaggagtacaagtgcaaggtctccaacaaaggcctcccgtcctccatcgagaaaaccatctccaaagccaaagggcagccccgagagccacaggtgtacaccctgcccccatcccaggaggagatgaccaagaaccaggtcagcctgacctgcctggtcaaaggcttctaccccagcgacatcgccgtggagtgggagagcaatgggcagccggagaacaactacaagaccacgcctcccgtgctggactccgacggctccttcttcctctacagcaggctaaccgtggacaagagcaggtggcaggaggggaatgtcttctcatgctccgtgatgcatgaggctctgcacaaccactacacacagaagagcctctccctgtctctgggtaaagctagctga

SEQ ID NO: 21 - DNA, 717 bp, Artificial Sequence
  Description of Artificial Sequence: Synthetic polynucleotide
atgaagttgcctgttaggctgttggtgctgatgttctggattcctgcttccagcagtgatgttgtgatgacccaaactccactctccctgcctgtcagtcttggagatcaagcctccatctcttgcagatctagtcagagccttgtacacagtaatggaaacacctatttacattggtacctgcagaagccaggccagtctccaaagctcctgatctacaaagtttccaaccgattttctggggtcccagacaggttcagtggcagtggatcagggacagatttcgcactcaagatcagtagagtggaggctgaggatctgggagtttatttctgctctcaaagtacacatgttccgtggacgttcggtggaggcaccaagctcgagatcaaacgaactgtggctgcaccatctgtcttcatcttcccgccatctgatgagcagttgaaatctggaactgcctctgttgtgtgcctgctgaataacttctatcccagagaggccaaagtacagtggaaggtggataacgccctccaatcgggtaactcccaggagagtgtcacagagcaggacagcaaggacagcacctacagcctcagcagcaccctgacgctgagcaaagcagactacgagaaacacaaagtctatgcctgcgaagtcacccatcagggcctgagctcgcccgtcacaaagagcttcaacaggggagagtgttag

SEQ ID NO: 22 - DNA, 1410 bp, Artificial Sequence
  Description of Artificial Sequence: Synthetic polynucleotide
atggaatggagttggatatttctctttcttctgtcaggaactgcaggtgtccactctgaggtccagctgcagcagtctggacctgagctggtaaagcctggggcttcagtgaagatgtcctgcaaggcttctggatacacattcactgactatgttttgcactgggtgaaacagaagcctgggcagggccttgagtggattggatatattaatccttacaatgatggtactaagtacaatgagaagttcaaaggcaaggccacactgacttcagacaaatcctccagcacagcctacatggagctcagcagcctgacctctgaggactctgcggtctattactgtgcaaggggctatccggcctactctgggtatgctatggactactggggtcaaggaacctcagtcaccgtctcctcagccaaaacgaagggcccatccgtcttccccctggcgccctgctccaggagcacctccgagagcacagccgccctgggctgcctggtcaaggactacttccccgaaccggtgacggtgtcgtggaactcaggcgccctgaccagcggcgtgcacaccttcccggctgtcctacagtcctcaggactctactccctcagcagcgtggtgaccgtgccctccagcagcttgggcacgaagacctacacctgcaacgtagatcacaagcccagcaacaccaaggtggacaagagagttgagtccaaatatggtcccccatgcccaccctgcccagcacctgagttcgaagggggaccatcagtcttcctgttccccccaaaacccaaggacactctcatgatctcccggacccctgaggtcacgtgcgtggtggtggacgtgagccaggaagaccccgaggtccagttcaactggtacgtggatggcgtggaggtgcataatgccaagacaaagccgcgggaggagcagttcaacagcacgtaccgtgtggtcagcgtcctcaccgtcctgcaccaggactggctgaacggcaaggagtacaagtgcaaggtctccaacaaaggcctcccgtcctccatcgagaaaaccatctccaaagccaaagggcagccccgagagccacaggtgtacaccctgcccccatcccaggaggagatgaccaagaaccaggtcagcctgacctgcctggtcaaaggcttctaccccagcgacatcgccgtggagtgggagagcaatgggcagccggagaacaactacaagaccacgcctcccgtgctggactccgacggctccttcttcctctacagcaggctaaccgtggacaagagcaggtggcaggaggggaatgtcttctcatgctccgtgatgcatgaggctctgcacaaccactacacacagaagagcctctccctgtctctgggtaaagctagctga

SEQ ID NO: 23 - DNA, 705 bp, Artificial Sequence
  Description of Artificial Sequence: Synthetic polynucleotide
atgatgtcctctgctcagttccttggtctcctgttgctctgttttcaaggtaccagatgtgatatccagatgacacagactacatcctccctgtctgcctctctgggagacagagtcaccatcagttgcagggcaagtcaggacattagcaattatttaaactggtatcagcagaaaccagatggaactgttaaactcctgatctactacacatcaagattacactcaggagtcccatcaaggttcagtggcagtgggtctggaacagattattctctcaccattagcaacctggagcaagaagatattgccacttacttttgccatcatggtaatacgcttccgtggacgttcggtggaggcaccaagctcgagatcaaacgaactgtggctgcaccatctgtcttcatcttcccgccatctgatgagcagttgaaatctggaactgcctctgttgtgtgcctgctgaataacttctatcccagagaggccaaagtacagtggaaggtggataacgccctccaatcgggtaactcccaggagagtgtcacagagcaggacagcaaggacagcacctacagcctcagcagcaccctgacgctgagcaaagcagactacgagaaacacaaagtctatgcctgcgaagtcacccatcagggcctgagctcgcccgtcacaaagagcttcaacaggggagagtgttag

SEQ ID NO: 24 - DNA, 1404 bp, Artificial Sequence
  Description of Artificial Sequence: Synthetic polynucleotide
atgaacttggggctcagcttgattttccttgtccttgttttaaaaggtgtccagtgtgaagtgaagctggtggagtctgggggaggcttagtgcagcctggagggtccctgaaactctcctgtgcaacctctggattcactttcagtgactattacatgtattgggttcgccagactccagagaagaggctggagtgggtcgcatacattaattctggtggtggtagcacctattatccagacactgtaaagggccgattcaccatctccagagacaatgccaagaacaccctgtacctgcaaatgagccggctgaagtctgaggacacagccatgtattactgtgcaagacgggggttaccgttccatgctatggactattggggtcaaggaacctcagtcaccgtctcctcagccaaaacgaagggcccatccgtcttccccctggcgccctgctccaggagcacctccgagagcacagccgccctgggctgcctggtcaaggactacttccccgaaccggtgacggtgtcgtggaactcaggcgccctgaccagcggcgtgcacaccttcccggctgtcctacagtcctcaggactctactccctcagcagcgtggtgaccgtgccctccagcagcttgggcacgaagacctacacctgcaacgtagatcacaagcccagcaacaccaaggtggacaagagagttgagtccaaatatggtcccccatgcccaccctgcccagcacctgagttcgaagggggaccatcagtcttcctgttccccccaaaacccaaggacactctcatgatctcccggacccctgaggtcacgtgcgtggtggtggacgtgagccaggaagaccccgaggtccagttcaactggtacgtggatggcgtggaggtgcataatgccaagacaaagccgcgggaggagcagttcaacagcacgtaccgtgtggtcagcgtcctcaccgtcctgcaccaggactggctgaacggcaaggagtacaagtgcaaggtctccaacaaaggcctcccgtcctccatcgagaaaaccatctccaaagccaaagggcagccccgagagccacaggtgtacaccctgcccccatcccaggaggagatgaccaagaaccaggtcagcctgacctgcctggtcaaaggcttctaccccagcgacatcgccgtggagtgggagagcaatgggcagccggagaacaactacaagaccacgcctcccgtgctggactccgacggctccttcttcctctacagcaggctaaccgtggacaagagcaggtggcaggaggggaatgtcttctcatgctccgtgatgcatgaggctctgcacaaccactacacacagaagagcctctccctgtctctgggtaaagctagctga

SEQ ID NO: 25 - DNA, 705 bp, Artificial Sequence
  Description of Artificial Sequence: Synthetic polynucleotide
atgatgtcctctgctcagttccttggtctcctgttgctctgttttcaaggtaccagatgtgatatccagatgacacagactacatcctccctgtctgcctctctaggagacagagtcaccatcagttgcagtgcaagtcagggcattagcaattatttaaactggtatcagcagaaaccagatggaactgttaaactcctgatctattacacatcaattttacactcaggagtcccatcaaggttcagtggcagtgggtctgggacagattattctctcaccatcggcaacctggaacctgaagatattgccacttactattgtcagcagtttaataagcttcctccgacgttcggtggaggcaccaaactcgagatcaaacgaactgtggctgcaccatctgtcttcatcttcccgccatctgatgagcagttgaaatctggaactgcctctgttgtgtgcctgctgaataacttctatcccagagaggccaaagtacagtggaaggtggataacgccctccaatcgggtaactcccaggagagtgtcacagagcaggacagcaaggacagcacctacagcctcagcagcaccctgacgctgagcaaagcagactacgagaaacacaaagtctatgcctgcgaagtcacccatcagggcctgagctcgcccgtcacaaagagcttcaacaggggagagtgttag

SEQ ID NO: 26 - DNA, 1405 bp, Artificial Sequence
  Description of Artificial Sequence: Synthetic polynucleotide
atggattggctgtggaacttgctattcctgatggcagctgcccaaagtgcccaagcacagatccagttggtgcagtctggacctgagctgaagaagcctggagagacagtcaagatctcctgcaaggcttctgggtattccttcacaaactatggaatgaactgggtgaaacaggctccaggaaagggtttaaagtggatgggctggataaacacctacactggagagtcaacatatgctgatgacttcaagggacggtttgccttctctttggaaacctctgccagcactgcctatttgcagatcagtaacctcaaaaatgaggacatggctacatatttctgtgctagaggggactttaggtactactattttgactactggggccaaggcaccactctcacaggctcctcagccaaaacgaagggcccatccgtcttccccctggcgccctgctccaggagcacctccgagagcacagccgccctgggctgcctggtcaaggactacttccccgaaccggtgacggtgtcgtggaactcaggcgccctgaccagcggcgtgcacaccttcccggctgtcctacagtcctcaggactctactccctcagcagcgtggtgaccgtgccctccagcagcttgggcacgaagacctacacctgcaacgtagatcacaagcccagcaacaccaaggtggacaagagagttgagtccaaatatggtcccccatgcccaccctgcccagcacctgagttcgaagggggaccatcagtcttcctgttccccccaaaacccaaggacactctcatgatctcccggacccctgaggtcacgtgcgtggtggtggacgtgagccaggaagaccccgaggtccagttcaactggtacgtggatggcgtggaggtgcataatgccaagacaaagccgcgggaggagcagttcaacagcacgtaccgtgtggtcagcgtcctcaccgtcctgcaccaggactggctgaacggcaaggagtacaagtgcaaggtctccaacaaaggcctcccgtcctccatcgagaaaaccatctccaaagccaaagggcagccccgagagccacaggtgtacaccctgcccccatcccaggaggagatgaccaagaaccaggtcagcctgacctgcctggtcaaaggcttctaccccagcgacatcgccgtggagtgggagagcaatgggcagccggagaacaactacaagaccacgcctcccgtgctggactccgacggctccttcttcctctacagcaggctaaccgtggacaagagcaggtggcaggaggggaatgtcttctcatgctccgtgatgcatgaggctctgcacaaccactacacacagaagagcctctccctgtctctgggtaaagctagctgat

SEQ ID NO: 27 - DNA, 702 bp, Artificial Sequence
  Description of Artificial Sequence: Synthetic polynucleotide
atgagtgtgctcactcaggtcctggcgttgctgctgctgtggcttacaggtgccagatgtgacatccagatgactcagtctccagcctccctatctgcatctgtgggagaaactgtcaccatcacgtgtcgagcaagtgggaatattcacaattatttagcatggtatcagcagaaacagggaaaatctcctcagctcctggtctataatgcaaaaaccttggcagatggtgtgccatcaaggttcagtggcagtggatcaggaacacaatattctctcaagatcaacaccctgcagcctgaagattttgggagttattactgtcaacatttttgggattcttggacgttcggtggaggcaccaagctcgagatcaaacgaactgtggctgcaccatctgtcttcatcttcccgccatctgatgagcagttgaaatctggaactgcctctgttgtgtgcctgctgaataacttctatcccagagaggccaaagtacagtggaaggtggataacgccctccaatcgggtaactcccaggagagtgtcacagagcaggacagcaaggacagcacctacagcctcagcagcaccctgacgctgagcaaagcagactacgagaaacacaaagtctatgcctgcgaagtcacccatcagggcctgagctcgcccgtcacaaagagcttcaacaggggagagtgttag

SEQ ID NO: 28 - DNA, 1398 bp, Artificial Sequence
  Description of Artificial Sequence: Synthetic polynucleotide
atggaatggacctgggtctttctcttcctcctgtcagtaactgcaggtgtccactcccaggttcagctgcagcagtctggagctgagctgatgaagcctggggcctcagtgaagatatcctgcaaggctactggctacacattcagtagctactggatagagtgggtaaagcagaggcctggacatggccttgagtggattggagagattttacctggaagtggtaggactaacgacaatgagaagttcaagggcaaggccacattcactgcagatacatcctccaagaaagcctacatgcaactcagcagcctgacatctgaggactctgccgtctattattgtgcaagaaggggtggttactcctttgcttactggggccaagggactctggtcactgtctctgcagccaaaacaaagggcccatccgtcttccccctggcgccctgctccaggagcacctccgagagcacagccgccctgggctgcctggtcaaggactacttccccgaaccggtgacggtgtcgtggaactcaggcgccctgaccagcggcgtgcacaccttcccggctgtcctacagtcctcaggactctactccctcagcagcgtggtgaccgtgccctccagcagcttgggcacgaagacctacacctgcaacgtagatcacaagcccagcaacaccaaggtggacaagagagttgagtccaaatatggtcccccatgcccaccctgcccagcacctgagttcgaagggggaccatcagtcttcctgttccccccaaaacccaaggacactctcatgatctcccggacccctgaggtcacgtgcgtggtggtggacgtgagccaggaagaccccgaggtccagttcaactggtacgtggatggcgtggaggtgcataatgccaagacaaagccgcgggaggagcagttcaacagcacgtaccgtgtggtcagcgtcctcaccgtcctgcaccaggactggctgaacggcaaggagtacaagtgcaaggtctccaacaaaggcctcccgtcctccatcgagaaaaccatctccaaagccaaagggcagccccgagagccacaggtgtacaccctgcccccatcccaggaggagatgaccaagaaccaggtcagcctgacctgcctggtcaaaggcttctaccccagcgacatcgccgtggagtgggagagcaatgggcagccggagaacaactacaagaccacgcctcccgtgctggactccgacggctccttcttcctctacagcaggctaaccgtggacaagagcaggtggcaggaggggaatgtcttctcatgctccgtgatgcatgaggctctgcacaaccactacacacagaagagcctctccctgtctctgggtaaagctagctga

SEQ ID NO: 29 - DNA, 1422 bp, Artificial Sequence
  Description of Artificial Sequence: Synthetic polynucleotide
atgaccatgttctcactagctcttctcctcagtcttcttctcctctgtgtctctgattctagggcagaaacaactgtgacccagtctatgaccatgttctcactagctcttctcctcagtcttcttctcctctgtgtctctgattctagggcagaaacaactgtgacccagtctccagcatccctgtccatggctataggggaaaaagtcaccatcagatgcgtaaccagcactgatattgatgatgatgtgaactggtaccagcagaagccaggggaacctcctaaactccttatttcagaaggcaatactcttcgtcctggagtcccatcccgattctccagcagtggctatggtacagattttgtttttacaattgagaacatgctctcagaagatgttgcagattactactgtttgcaaagtggtaacttgccgtacacgttcggaggggggaccaagctcgagatcaaacgaactgtggctgcaccatctgtcttcatcttcccgccatctgatgagcagttgaaatctggaactgcctctgttgtgtgcctgctgaataacttctatcccagagaggccaaagtacagtggaaggtggataacgccctccaatcgggtaactcccaggagagtgtcacagagcaggacagcaaggacagcacctacagcctcagcagcaccctgacgctgagcaaagcagactacgagaaacacaaagtctatgcctgcgaagtcacccatcagggcctgagctcgcccgtcacaaagagcttcaacaggggagagtgttagccagcatccctgtccatggctataggggaaaaagtcaccatcagatgcgtaaccagcactgatattgatgatgatgtgaactggtaccagcagaagccaggggaacctcctaaactccttatttcagaaggcaatactcttcgtcctggagtcccatcccgattctccagcagtggctatggtacagattttgtttttacaattgagaacatgctctcagaagatgttgcagattactactgtttgcaaagtggtaacttgccgtacacgttcggaggggggaccaagctcgagatcaaacgaactgtggctgcaccatctgtcttcatcttcccgccatctgatgagcagttgaaatctggaactgcctctgttgtgtgcctgctgaataacttctatcccagagaggccaaagtacagtggaaggtggataacgccctccaatcgggtaactcccaggagagtgtcacagagcaggacagcaaggacagcacctacagcctcagcagcaccctgacgctgagcaaagcagactacgagaaacacaaagtctatgcctgcgaagtcacccatcagggcctgagctcgcccgtcacaaagagcttcaacaggggagagtgttag

SEQ ID NO: 30 - DNA, 1404 bp, Artificial Sequence
  Description of Artificial Sequence: Synthetic polynucleotide
atggcttgggtgtggaccttgctattcctgatggcagctgcccaaagtgcccaagcacagatccagttggtgcagtctggacctgagctgaagaagcctggagagacagtcaagatctcctgcaaggcttctgggtataccttcacaaactatggaatgaactgggtgaagcaggctccaggaaagggtttaaagtgggtgggctggataaacaccttcactggagagccaacatatgttgatgacttcaagggacggtttgccttctctttggaaacctctgccagcactgcctatttgcagatcaacaacctcaaaaatgaggacacggctacatatttctgtgcaagagggaattttaggtactactactttgactactggggccaaggcaccactctcacagtctcctcagccaaaacaaagggcccatccgtcttccccctggcgccctgctccaggagcacctccgagagcacagccgccctgggctgcctggtcaaggactacttccccgaaccggtgacggtgtcgtggaactcaggcgccctgaccagcggcgtgcacaccttcccggctgtcctacagtcctcaggactctactccctcagcagcgtggtgaccgtgccctccagcagcttgggcacgaagacctacacctgcaacgtagatcacaagcccagcaacaccaaggtggacaagagagttgagtccaaatatggtcccccatgcccaccctgcccagcacctgagttcgaagggggaccatcagtcttcctgttccccccaaaacccaaggacactctcatgatctcccggacccctgaggtcacgtgcgtggtggtggacgtgagccaggaagaccccgaggtccagttcaactggtacgtggatggcgtggaggtgcataatgccaagacaaagccgcgggaggagcagttcaacagcacgtaccgtgtggtcagcgtcctcaccgtcctgcaccaggactggctgaacggcaaggagtacaagtgcaaggtctccaacaaaggcctcccgtcctccatcgagaaaaccatctccaaagccaaagggcagccccgagagccacaggtgtacaccctgcccccatcccaggaggagatgaccaagaaccaggtcagcctgacctgcctggtcaaaggcttctaccccagcgacatcgccgtggagtgggagagcaatgggcagccggagaacaactacaagaccacgcctcccgtgctggactccgacggctccttcttcctctacagcaggctaaccgtggacaagagcaggtggcaggaggggaatgtcttctcatgctccgtgatgcatgaggctctgcacaaccactacacacagaagagcctctccctgtctctgggtaaagctagctga

SEQ ID NO: 31 - DNA, 705 bp, Artificial Sequence
  Description of Artificial Sequence: Synthetic polynucleotide
atgagtgtgctcactcaggtcctggcgttgctgctgctgtggcttacaggtgccagatgtgacatccagatgactcagtccccagcctccctatctgcatctgtgggagaaactgtcaccatcacatgtcgaacaagtgggaatattcgcaattatttagcatggtatcagcagaaacagggaaaatctcctcaactcctggtctataatgcaaaaaccttagcagatggtgtgccatcaaggttcggtggcagtggatcaggaacacaatattctctcaagatcaacagcctgcagcctgaagattttgggaattattactgtcaacatttttggagtagtccgtacacgttcggaggggggaccaagctcgagatcaaacgaactgtggctgcaccatctgtcttcatcttcccgccatctgatgagcagttgaaatctggaactgcctctgttgtgtgcctgctgaataacttctatcccagagaggccaaagtacagtggaaggtggataacgccctccaatcgggtaactcccaggagagtgtcacagagcaggacagcaaggacagcacctacagcctcagcagcaccctgacgctgagcaaagcagactacgagaaacacaaagtctatgcctgcgaagtcacccatcagggcctgagctcgcccgtcacaaagagcttcaacaggggagagtgttag

SEQ ID NO: 32 - DNA, 2811 bp, Artificial Sequence
  Description of Artificial Sequence: Synthetic polynucleotide
atgatgggatggagctatatcatcctctttttggtagcaacagctacagatgtccactcccaggtccaactgcagcagcctggggctgaactggtgaagcctggggcttcagtgaagctgtcctgcaaggcttctggctacaccttcaccagctactggatgcactgggtgaagcagaggcctggagaaggccttgagtggattggagagattaatcctagctacggtcgtactgactacaatgagaagttcaagaacaaggccacactgactgtagccaaatcctccagcacagcctacatgcaactcagcagcctgacatctgaggactctgcggtctattactgtgcaagaggagattactacggtagtagctcgtttgcttactggggccaagggactctggtcactgtctctgcagccaaaacaaagggcccatccgtcttccccctggcgccctgctccaggagcacctccgagagcacagccgccctgggctgcctggtcaaggactacttccccgaaccggtgacggtgtcgtggaactcaggcgccctgaccagcggcgtgcacaccttcccggctgtcctacagtcctcaggactctactccctcagcagcgtggtgaccgtgccctccagcagcttgggcacgaagacctacacctgcaacgtagatcacaagcccagcaacaccaaggtggacaagagagttgagtccaaatatggtcccccatgcccaccctgcccagcacctgagttcgaagggggaccatcagtcttcctgttccccccaaaacccaaggacactctcatgatctcccggacccctgaggtcacgtgcgtggtggtggacgtgagccaggaagaccccgaggtccagttcaactggtacgtggatggcgtggaggtgcataatgccaagacaaagccgcgggaggagcagttcaacagcacgtaccgtgtggtcagcgtcctcaccgtcctgcaccaggactggctgaacggcaaggagtacaagtgcaaggtctccaacaaaggcctcccgtcctccatcgagaaaaccatctccaaagccaaagggcagccccgagagccacaggtgtacaccctgcccccatcccaggaggagatgaccaagaaccaggtcagcctgacctgcctggtcaaaggcttctaccccagcgacatcgccgtggagtgggagagcaatgggcagccggagaacaactacaagaccacgcctcccgtgctggactccgacggctccttcttcctctacagcaggctaaccgtggacaagagcaggtggcaggaggggaatgtcttctcatgctccgtgatgcatgaggctctgcacaaccactacacacagaagagcctctccctgtctctgggtaaagctagcggatggagctatatcatcctctttttggtagcaacagctacagatgtccactcccaggtccaactgcagcagcctggggctgaactggtgaagcctggggcttcagtgaagctgtcctgcaaggcttctggctacaccttcaccagctactggatgcactgggtgaagcagaggcctggagaaggccttgagtggattggagagattaatcctagctacggtcgtactgactacaatgggaagttcaagaacaaggccacactgactgtagccaaatcctccagcacagcctacatgcaactcagcagcctgacatctgaggactctgcggtctattactgtgcaagaggagattactacggtagtagctcgtttgcttactggggccaagggactctggtcactgtctctgcagccaaaacaaagggcccatccgtcttccccctggcgccctgctccaggagcacctccgagagcacagccgccctgggctgcctggtcaaggactacttccccgaaccggtgacggtgtcgtggaactcaggcgccctgaccagcggcgtgcacaccttcccggctgtcctacagtcctcaggactctactccctcagcagcgtggtgaccgtgccctccagcagcttgggcacgaagacctacacctgcaacgtagatcacaagcccagcaacaccaaggtggacaagagagttgagtccaaatatggtcccccatgcccaccctgcccagcacctgagttcgaagggggaccatcagtcttcctgttccccccaaaacccaaggacactctcatgatctcccggacccctgaggtcacgtgcgtggtggtggacgtgagccaggaagaccccgaggtccagttcaactggtacgtggatggcgtggaggtgcataatgccaagacaaagccgcgggaggagcagttcaacagcacgtaccgtgtggtcagcgtcctcaccgtcctgcaccaggactggctgaacggcaaggagtacaagtgcaaggtctccaacaaaggcctcccgtcctccatcgagaaaaccatctccaaagccaaagggcagccccgagagccacaggtgtacaccctgcccccatcccaggaggagatgaccaagaaccaggtcagcctgacctgcctggtcaaaggcttctaccccagcgacatcgccgtggagtgggagagcaatgggcagccggagaacaactacaagaccacgcctcccgtgctggactccgacggctccttcttcctctacagcaggctaaccgtggacaagagcaggtggcaggaggggaatgtcttctcatgctccgtgatgcatgaggctctgcacaaccactacacacagaagagcctctccctgtctctgggtaaagctagctga

SEQ ID NO: 33 - DNA, 708 bp, Artificial Sequence
  Description of Artificial Sequence: Synthetic polynucleotide
atggattttcaagtgcagattttcagcttcctgctaatgagtgcctcagtcataatgtccaggggacaaattgttctcacccagtctccagcactcatgtctgcatctccaggggagaaggtcaccatgacctgcagtgccagctcaaatataagttacatgtactggtaccagcagaagccaagatcctcccccaaaccctggatttatctcacatccaacctggcttctggagtccctgctcgcttcagtggcagtgggtctgggacctcttactctctcacaaccagcagcatggaggctgaagatgctgccacttattgctgccagcagtggagtagtaacccacccacgttcggtgctgggaccaagctcgagatcaaacgaactgtggctgcaccatctgtcttcatcttcccgccatctgatgagcagttgaaatctggaactgcctctgttgtgtgcctgctgaataacttctatcccagagaggccaaagtacagtggaaggtggataacgccctccaatcgggtaactcccaggagagtgtcacagagcaggacagcaaggacagcacctacagcctcagcagcaccctgacgctgagcaaagcagactacgagaaacacaaagtctatgcctgcgaagtcacccatcagggcctgagctcgcccgtcacaaagagcttcaacaggggagagtgttag

SEQ ID NO: 34 - DNA, 708 bp, Artificial Sequence
  Description of Artificial Sequence: Synthetic polynucleotide
atggattttcgagtgcagattttcagcttcctgctaatgagtgcctcagtcataatgtccaggggacaaattgttctcacccagtctccagcactcatgtctgcatctccaggggagaaggtcaccatgacctgcagtgccagctcaaatataagttacatgtactggtaccagcagaagccaagatcctcccccaaaccctggatttatctcacatccaacctggcttctggagtccctgctcgcttcagtggcagtgggtctgggacctcttactctctcacaatcagcagcatggaggctgaagatgctgccacttattactgccagcagtggagtagtaacccacccacgttcggtgctgggaccaagctcgagatcaaacgaactgtggctgcaccatctgtcttcatcttcccgccatctgatgagcagttgaaatctggaactgcctctgttgtgtgcctgctgaataacttctatcccagagaggccaaagtacagtggaaggtggataacgccctccaatcgggtaactcccaggagagtgtcacagagcaggacagcaaggacagcacctacagcctcagcagcaccctgacgctgagcaaagcagactacgagaaacacaaagtctatgcctgcgaagtcacccatcagggcctgagctcgcccgtcacaaagagcttcaacaggggagagtgttag

SEQ ID NO: 35 - DNA, 717 bp, Artificial Sequence
  Description of Artificial Sequence: Synthetic polynucleotide
atggagacagacacactcctgctatgggtgctgctgctctgggttccaggttccacaggtgacattgtgctgatccaatctccagcttctttggctgtgtctctagggcagagggccaccatatcctgcagagccagtgaaagtgttgatagttatgtcaatagttttatgcactggtaccagcagaaaccaggacagccacccaaactcctcatctatcgtgtatccaacctagaatctgggatccctgccaggttcagtggcagtgggtctaggacagacttcaccctcaccattaatcctgtggaggctgatgatgttgcaacctattactgtcagcaaagtaatgaggatccattcacgttcggctcggggacaaagctcgagatcaaacgaactgtggctgcaccatctgtcttcatcttcccgccatctgatgagcagttgaaatctggaactgcctctgttgtgtgcctgctgaataacttctatcccagagaggccaaagtacagtggaaggtggataacgccctccaatcgggtaactcccaggagagtgtcacagagcaggacagcaaggacagcacctacagcctcagcagcaccctgacgctgagcaaagcagactacgagaaacacaaagtctatgcctgcgaagtcacccatcagggcctgagctcgcccgtcacaaagagcttcaacaggggagagtgttag

SEQ ID NO: 36 - DNA, 1398 bp, Artificial Sequence
  Description of Artificial Sequence: Synthetic polynucleotide
atggaatgtaactggatacttccttttattctgtcggtaatttcaggggtctactcagaggttcagctccagcagtctgggactgtgctggcaaggcctggggcttccgtgaatatgtcctgtaaggctgctggctacagctttaccagttactgggtgtactgggtcaaacagaggcctggacagggtctggaatggattggtgctatttaccctaaaaatagtagaactagctacaaccagaagttccaggacaaggccacactgactgcagtcacatccgccagcactgcctacatggagctcagcagcctgacaaatgaggactctgcggtctattactgtacaagacctcactatgattcgtttggttactggggccaagggactctggtcactgtctctgcagccaaaacaaagggcccatccgtcttccccctggcgccctgctccaggagcacctccgagagcacagccgccctgggctgcctggtcaaggactacttccccgaaccggtgacggtgtcgtggaactcaggcgccctgaccagcggcgtgcacaccttcccggctgtcctacagtcctcaggactctactccctcagcagcgtggtgaccgtgccctccagcagcttgggcacgaagacctacacctgcaacgtagatcacaagcccagcaacaccaaggtggacaagagagttgagtccaaatatggtcccccatgcccaccctgcccagcacctgagttcgaagggggaccatcagtcttcctgttccccccaaaacccaaggacactctcatgatctcccggacccctgaggtcacgtgcgtggtggtggacgtgagccaggaagaccccgaggtccagttcaactggtacgtggatggcgtggaggtgcataatgccaagacaaagccgcgggaggagcagttcaacagcacgtaccgtgtggtcagcgtcctcaccgtcctgcaccaggactggctgaacggcaaggagtacaagtgcaaggtctccaacaaaggcctcccgtcctccatcgagaaaaccatctccaaagccaaagggcagccccgagagccacaggtgtacaccctgcccccatcccaggaggagatgaccaagaaccaggtcagcctgacctgcctggtcaaaggcttctaccccagcgacatcgccgtggagtgggagagcaatgggcagccggagaacaactacaagaccacgcctcccgtgctggactccgacggctccttcttcctctacagcaggctaaccgtggacaagagcaggtggcaggaggggaatgtcttctcatgctccgtgatgcatgaggctctgcacaaccactacacacagaagagcctctccctgtctctgggtaaagctagctga

SEQ ID NO: 37 - DNA, 717 bp, Artificial Sequence
  Description of Artificial Sequence: Synthetic polynucleotide
atggagacagacacactcctgctatgggtgctgctgctctgggttccaggttccacaggtgacattgtgctgacccaatctccagcttctttggctgtgtctctagggcagagggccaccatatcctgcagagccagtgaaagtgtagatagttatggcattagttttatgcactggtaccagcagaaaccaggacagccacccaaactcctcatctatcgtgcatccaaccaagaatctgggatccctgccaggttcagtggcagtgggtctaggacagacttcaccctcaccattaatcctgtggaggctgatgatgttgcaacctattactgtcagcaaagtaatgaggatccgctcacgttcggtgctgggaccaagctcgagatcaaacgaactgtggctgcaccatctgtcttcatcttcccgccatctgatgagcagttgaaatctggaactgcctctgttgtgtgcctgctgaataacttctatcccagagaggccaaagtacagtggaaggtggataacgccctccaatcgggtaactcccaggagagtgtcacagagcaggacagcaaggacagcacctacagcctcagcagcaccctgacgctgagcaaagcagactacgagaaacacaaagtctatgcctgcgaagtcacccatcagggcctgagctcgcccgtcacaaagagcttcaacaggggagagtgttag

SEQ ID NO: 38 - DNA, 1422 bp, Artificial Sequence
  Description of Artificial Sequence: Synthetic polynucleotide
atgaacaggcttacttcctcattgctgctgctgattgtccctgcatatgtcctgtcccaggttactctgaaagagtctggccctgggatattgcagccctcccagaccctcagtctgacttgttctttctctgggttttcactgagcacttctggtatgggtgtgagctggattcgtcagccttcaggaaagggtctggagtggctggcacacatttactgggatgatgacaagcgctataatccatccctgaagagccggctcacaatctttaaggatccctccagcaaccaggtattcctcaggatcaccagtgtggacactgcagatactgccacatactactgtgctcgaaactcccattactacggtagtacttacgggggatacttcgatgtctggggcgcagggaccacggtcaccgtctcctcagccaaaacaaagggcccatccgtcttccccctggcgccctgctccaggagcacctccgagagcacagccgccctgggctgcctggtcaaggactacttccccgaaccggtgacggtgtcgtggaactcaggcgccctgaccagcggcgtgcacaccttcccggctgtcctacagtcctcaggactctactccctcagcagcgtggtgaccgtgccctccagcagcttgggcacgaagacctacacctgcaacgtagatcacaagcccagcaacaccaaggtggacaagagagttgagtccaaatatggtcccccatgcccaccctgcccagcacctgagttcgaagggggaccatcagtcttcctgttccccccaaaacccaaggacactctcatgatctcccggacccctgaggtcacgtgcgtggtggtggacgtgagccaggaagaccccgaggtccagttcaactggtacgtggatggcgtggaggtgcataatgccaagacaaagccgcgggaggagcagttcaacagcacgtaccgtgtggtcagcgtcctcaccgtcctgcaccaggactggctgaacggcaaggagtacaagtgcaaggtctccaacaaaggcctcccgtcctccatcgagaaaaccatctccaaagccaaagggcagccccgagagccacaggtgtacaccctgcccccatcccaggaggagatgaccaagaaccaggtcagcctgacctgcctggtcaaaggcttctaccccagcgacatcgccgtggagtgggagagcaatgggcagccggagaacaactacaagaccacgcctcccgtgctggactccgacggctccttcttcctctacagcaggctaaccgtggacaagagcaggtggcaggaggggaatgtcttctcatgctccgtgatgcatgaggctctgcacaaccactacacacagaagagcctctccctgtctctgggtaaagctagctga

SEQ ID NO: 39 - DNA, 717 bp, Artificial Sequence
  Description of Artificial Sequence: Synthetic polynucleotide
atggagacagacacactcctgctatgggtgctgctgctcggggttccaggttccacaggtaacattgtgctgacccagtctccaacttctttcactgtgtctcttgggcagagggccaccatatcctgcagagccagtgaaagtgttcatagttatggcaatagttttatgcactggtaccagcagaaaccagggcagccacccaaactcctcatctatcttgcatccaacgtagaatctggggtccctgccaggttcagtggtagtgggtccaggacagacttcaccctcaccattgatcctgtggaggctgatgatgctgcaacctattactgtcagcaaaatagtgaggatccgtggacgttcggtggaggcaccaagctcgagatcaaacgaactgtggctgcaccatctgtcttcatcttcccgccatctgatgagcagttgaaatctggaactgcctctgttgtgtgcctgctgaataacttctatcccagagaggccaaagtacagtggaaggtggataacgccctccaatcgggtaactcccaggagagtgtcacagagcaggacagcaaggacagcacctacagcctcagcagcaccctgacgctgagcaaagcagactacgagaaacacaaagtctatgcctgcgaagtcacccatcagggcctgagctcgcccgtcacaaagagcttcaacaggggagagtgttag

SEQ ID NO: 40 - DNA, 1398 bp, Artificial Sequence
  Description of Artificial Sequence: Synthetic polynucleotide
atggaatggacctgggtctttctcttcctcctgtcagtaactgcaggtgtccactcccaggttcagctgcagcagtctggaactgagctgatgaagcctggggcctcagtgaagatatcctgcaaggctactggctacacattcagtacctactggatagagtgggtaaagcagaggcctggacatggccttgagtggattggagagattttacctggaagtggtaggactaacgacaatgagaagttcaagggcaaggccacaatcactgcagatacatcctccaagaaagcctacatgcaactcagcagcctgacatctgaggactctgccgtctattactgtgcaagaaggggtggttactcctttgctttctggggccaagggactctggtctctgtctctgcagccaaaacaaagggcccatccgtcttccccctggcgccctgctccaggagcacctccgagagcacagccgccctgggctgcctggtcaaggactacttccccgaaccggtgacggtgtcgtggaactcaggcgccctgaccagcggcgtgcacaccttcccggctgtcctacagtcctcaggactctactccctcagcagcgtggtgaccgtgccctccagcagcttgggcacgaagacctacacctgcaacgtagatcacaagcccagcaacaccaaggtggacaagagagttgagtccaaatatggtcccccatgcccaccctgcccagcacctgagttcgaagggggaccatcagtcttcctgttccccccaaaacccaaggacactctcatgatctcccggacccctgaggtcacgtgcgtggtggtggacgtgagccaggaagaccccgaggtccagttcaactggtacgtggatggcgtggaggtgcataatgccaagacaaagccgcgggaggagcagttcaacagcacgtaccgtgtggtcagcgtcctcaccgtcctgcaccaggactggctgaacggcaaggagtacaagtgcaaggtctccaacaaaggcctcccgtcctccatcgagaaaaccatctccaaagccaaagggcagccccgagagccacaggtgtacaccctgcccccatcccaggaggagatgaccaagaaccaggtcagcctgacctgcctggtcaaaggcttctaccccagcgacatcgccgtggagtgggagagcaatgggcagccggagaacaactacaagaccacgcctcccgtgctggactccgacggctccttcttcctctacagcaggctaaccgtggacaagagcaggtggcaggaggggaatgtcttctcatgctccgtgatgcatgaggctctgcacaaccactacacacagaagagcctctccctgtctctgggtaaagctagctga

SEQ ID NO: 41 - DNA, 711 bp, Artificial Sequence
  Description of Artificial Sequence: Synthetic polynucleotide
atgaccatgttctcactagctcttctcctcagtcttcttctcctctgtgtctctgattctagggcagaaacaactgtgacccagtctccagcatccctgtccatggctataggagaaaaagtcaccatcagatgcgtaaccagcactgatattgatgatgatgtgaactggtaccagcagaagccaggggaacctcctaagctccttatttcagaaggcaatactcttcgtgctggagtcccatcccgattctccagcagtggctatggtacagattttgtttttacaattgagaacatgctctcagaagatgttgcagattactactgtttgcaaagtggtaacttgccgtacacgttcggaggggggaccaagctcgagatcaaacgaactgtggctgcaccatctgtcttcatcttcccgccatctgatgagcagttgaaatctggaactgcctctgttgtgtgcctgctgaataacttctatcccagagaggccaaagtacagtggaaggtggataacgccctccaatcgggtaactcccaggagagtgtcacagagcaggacagcaaggacagcacctacagcctcagcagcaccctgacgctgagcaaagcagactacgagaaacacaaagtctatgcctgcgaagtcacccatcagggcctgagctcgcccgtcacaaagagcttcaacaggggagagtgttag

SEQ ID NO: 42 - DNA, 1422 bp, Artificial Sequence
  Description of Artificial Sequence: Synthetic polynucleotide
atgaacaggcttacttcctcattgctgctgctgattgtccctgcatatgtcctgtcccaggttactctgaaagagtctggccctgggatattgcagccctcccagaccctcagtctgacttgttctttctctgggttttcactgagcacttctggtatgggtctgagctggattcgtcagccttcaggaaagggtctggagtggctggcacacatttactgggatgatgacaagcgctataacccatccctgaagagccggctcacaatctccaaggatacctccagcaaccaggttttcctcaagatcaccattgtggacactgcagatgctgccacatactactgtgctcgaagctcccattactacggttatggctacgggggatacttcgatgtctggggcgcagggaccacggtcaccgtctcctcagccaaaacgaagggcccatccgtcttccccctggcgccctgctccaggagcacctccgagagcacagccgccctgggctgcctggtcaaggactacttccccgaaccggtgacggtgtcgtggaactcaggcgccctgaccagcggcgtgcacaccttcccggctgtcctacagtcctcaggactctactccctcagcagcgtggtgaccgtgccctccagcagcttgggcacgaagacctacacctgcaacgtagatcacaagcccagcaacaccaaggtggacaagagagttgagtccaaatatggtcccccatgcccaccctgcccagcacctgagttcgaagggggaccatcagtcttcctgttccccccaaaacccaaggacactctcatgatctcccggacccctgaggtcacgtgcgtggtggtggacgtgagccaggaagaccccgaggtccagttcaactggtacgtggatggcgtggaggtgcataatgccaagacaaagccgcgggaggagcagttcaacagcacgtaccgtgtggtcagcgtcctcaccgtcctgcaccaggactggctgaacggcaaggagtacaagtgcaaggtctccaacaaaggcctcccgtcctccatcgagaaaaccatctccaaagccaaagggcagccccgagagccacaggtgtacaccctgcccccatcccaggaggagatgaccaagaaccaggtcagcctgacctgcctggtcaaaggcttctaccccagcgacatcgccgtggagtgggagagcaatgggcagccggagaacaactacaagaccacgcctcccgtgctggactccgacggctccttcttcctctacagcaggctaaccgtggacaagagcaggtggcaggaggggaatgtcttctcatgctccgtgatgcatgaggctctgcacaaccactacacacagaagagcctctccctgtctctgggtaaagctagctga

SEQ ID NO: 43 - DNA, 823 bp, Artificial Sequence
  Description of Artificial Sequence: Synthetic polynucleotide
atggagacagacacactcctgctatgggtgctgctgctctgggttccaggttccacaggtaacattgtgctgacccaatctccagcttctttggctgtgtctctagggcagagggccaccatatcctgcagagccagtgaaagtattcatagttatggcaatagttttctgcactggtaccagcagaaaccaggacagccacccaaactcctcatctatcttgcatccaacctagaatctggggtccctgccaggttcagcggcagtgggtctaggacagacttcaccctcaccattgatcctgtggaggctgatgatgctgcaacctattactgtcagcaaaataatgaggatccgtggacgttcggtggaggcaccaagctcgagatcaaacgaactgtggctgcaccatctgtcttcatcttcccgccatctgatgagcagttgaaatctggaactgcctctgttgtgtgcctgctgaataacttctatcccagagaggccaaagtacagtggaaggtggataacgccctccaatcgggtaactcccaggagagtgtcacagagcaggacagcaaggacagcacctacagcctcagcagcaccctgacgctgagcaaagcagactacgagaaacacaaagtctatgcctgcgaagtcacccatcagggcctgagctcgcccgtcacaaagagcttcaacaggggagagtgttaggcggccgcactagcgcgggccgcattcgaagagctcggtacccggggatcctctagagtcgacctgcaggcatgcaagctggccgcgactctagatcataatcagc

SEQ ID NO: 44 - DNA, 1404 bp, Artificial Sequence
  Description of Artificial Sequence: Synthetic polynucleotide
atgaaatgcagctgggtcatcttcttcctgatggcagtggttacaggggtcaattcagaggttcagctgcagcagtctggggctgagcttgtgaggccaggggccttagtcaagttgtcctgcaaagcttctggcttcaacattaatgactactatatccactgggtgaagcagcggcctgaacagggcctggagcggattggatggattgatcctgacaatggtaatactatatatgacccgaagttccagggcaaggccagtataacagcagacacatcccccaacacagcctacctgcagctcagcagcctgacatctgaggacactgccgtctattactgtgctagaacccgatctcctatggttacgacggggtttgtttactggggccaagggactgtggtcactgtctctgcagccaaaacgaagggcccatccgtcttccccctggcgccctgctccaggagcacctccgagagcacagccgccctgggctgcctggtcaaggactacttccccgaaccggtgacggtgtcgtggaactcaggcgccctgaccagcggcgtgcacaccttcccggctgtcctacagtcctcaggactctactccctcagcagcgtggtgaccgtgccctccagcagcttgggcacgaagacctacacctgcaacgtagatcacaagcccagcaacaccaaggtggacaagagagttgagtccaaatatggtcccccatgcccaccctgcccagcacctgagttcgaagggggaccatcagtcttcctgttccccccaaaacccaaggacactctcatgatctcccggacccctgaggtcacgtgcgtggtggtggacgtgagccaggaagaccccgaggtccagttcaactggtacgtggatggcgtggaggtgcataatgccaagacraagccgcgggaggagcagttcaacagcacgtaccgtgtggtcagcgtcctcaccgtcctgcaccaggactggctgaacggcaaggagtacaagtgcaaggtctccaacaaaggcctcccgtcctccatcgagaaaaccatctccaaagccaaagggcagccccgagagccacaggtgtacaccctgcccccatcccaggaggagatgaccaagaaccaggtcagcctgacctgcctggtcaaaggcttctaccccagcgacatcgccgtggagtgggagagcaatgggcagccggagaacaactacaagaccacgcctcccgtgctggactccgacggctccttcttcctctacagcaggctaaccgtggacaagagcaggtggcaggaggggaatgtcttctcatgctccgtgatgcatgaggctctgcacaaccactacacacagaagagcctctccctgtctctgggtaaatga

SEQ ID NO: 45 - DNA, 1425 bp, Artificial Sequence
  Description of Artificial Sequence: Synthetic polynucleotide
atggaaaggcactggatctttctcttcctgttttcagtaactgcaggtgtccactcccaggtccagcttcagcagtctggggctgagctggcaaaacctggggcctcagtgaagatgtcctgcaaggcttctggctacacctttactacctactggatgcactgggtaaaacagaggcctggacagggtctggaatggattggatacattaatcctatcactggttatactgagtacaatcagaagttcaaggacaaggccaccttgactgcagacaaatcctccagcacagcctacatgcaactgagcagcctgacatctgaggactctgcagtctattactgtgcaagagagggtttaagtgctatggactattggggtcagggaacctcagtcaccgtcacctcagccaaaacaacagccccatcggtctatccactggcccctgtgtgtggagatacaactggctcctcggtaactctaggatgcctggtcaagggttatttccctgagccagtgaccttgacctggaactctggatccctgtccagtggtgtgcacaccttcccagctgtcctgcagtctgacctctacaccctcagcagctcagtgactgtaacctcgagcacctggcccagccagaccgtcacctgcagcgttgctcacccagccagcagcaccacggtggacaaaaaacttgagcccagcgggcccatttcaacaatcaacccctgtcctccatgcaaggagtgtcacaaatgcccagctcctaacctcgagggtggaccatccgtcttcatcttccctccaaatatcaaggatgtactcatgatctccctgacacccaaggtcacgtgtgtggtggtggatgtgagcgaggatgacccagacgtccagatcagctggtttgtgaacaacgtggaagtacacacagctcagacacaaacccatagagaggattacaacagtactatccgggtggtcagcaccctccccatccagcaccaggactggatgagtggcaaggagttcaaatgcaaggtcaacaacaaagacctcccatcacccatcgagagaaccatctcaaaaattaaagggctagtcagagctccacaagtatacatcttgccgccaccagcagagcagttgtccaggaaagatgtcagtctcacttgcctggtcgtgggcttcaaccctggagacatcagtgtggagtggaccagcaatgggcatacagaggagaactacaaggacaccgcaccagtcctggactctgacggttcttacttcatatatagcaagctcaatatgaaaacaagcaagtgggagaaaacagattccttctcatgcaacgtgagacacgagggtctgaaaaattactacctgaagaagaccatctcccggtctccgggtaaagctagctga

SEQ ID NO: 46 - DNA, 717 bp, Artificial Sequence
  Description of Artificial Sequence: Synthetic polynucleotide
atgggcatcaagatggagtcacggattcaggcatttgtattcgtgtttctctggttgtctggtgttggcggagacattgtgatgacccagtctcacaaattcatgtccacatcagtaggagacagggtcagcgtcacctgcaaggccagtcaggatgtgacttctgctgtagcctggtatcaacaaaaaccagggcaatctcctaaactactgatttactgggcatccacccggcacactggagtccctgatcgcttcacaggcagtggatctgggacagattatactctcaccatcagcagtgggcaggctgaagacctggcactttattactgtcaccaatattatagcgctcctcggacgttcggtggaggcaccaagctggaagtcaaacgggctgatgctgcaccaactgtatccatcttcccaccatccagtgagcagttaacatctggaggtgcctcagtcgtgtgcttcttgaacaacttctaccccaaagacatcaatgtcaagtggaagattgatggcagtgaacgacaaaatggcgtcctgaacagttggactgatcaggacagcaaagacagcacctacagcatgagcagcaccctcacgttgaccaaggacgagtatgaacgacataacagctatacctgtgaggccactcacaagacatcaacttcacccatcgtcaagagcttcaataggaatgagtgttag

SEQ ID NO: 47 - DNA, 1398 bp, Artificial Sequence
  Description of Artificial Sequence: Synthetic polynucleotide
atggaaaggcactggatctttctcttcctgttttcagtaactgcaggtgtccactcccaggtccagcttcagcagtctggggctgagctggcaaaacctggggcctcagtgaagatgtcctgcaaggcttctggctacacctttactacctactggatgcactgggtaaaacagaggcctggacagggtctggaatggattggatacattaatcctatcactggttatactgagtacaatcagaagttcaaggacaaggccaccttgactgcagacaaatcctccagcacagcctacatgcaactgagcagcctgacatctgaggactctgcagtctattactgtgcaagagagggtttaagtgctatggactattggggtcagggaacctcagtcaccgtcacctcagccaaaacaacgggcccatccgtcttccccctggcgccctgctccaggagcacctccgagagcacagccgccctgggctgcctggtcaaggactacttccccgaaccggtgacggtgtcgtggaactcaggcgccctgaccagcggcgtgcacaccttcccggctgtcctacagtcctcaggactctactccctcagcagcgtggtgaccgtgccctccagcagcttgggcacgaagacctacacctgcaacgtagatcacaagcccagcaacaccaaggtggacaagagagttgagtccaaatatggtcccccatgcccaccctgcccagcacctgagttcgaagggggaccatcagtcttcctgttccccccaaaacccaaggacactctcatgatctcccggacccctgaggtcacgtgcgtggtggtggacgtgagccaggaagaccccgaggtccagttcaactggtacgtggatggcgtggaggtgcataatgccaagacaaagccgcgggaggagcagttcaacagcacgtaccgtgtggtcagcgtcctcaccgtcctgcaccaggactggctgaacggcaaggagtacaagtgcaaggtctccaacaaaggcctcccgtcctccatcgagaaaaccatctccaaagccaaagggcagccccgagagccacaggtgtacaccctgcccccatcccaggaggagatgaccaagaaccaggtcagcctgacctgcctggtcaaaggcttctaccccagcgacatcgccgtggagtgggagagcaatgggcagccggagaacaactacaagaccacgcctcccgtgctggactccgacggctccttcttcctctacagcaggctaaccgtggacaagagcaggtggcaggaggggaatgtcttctcatgctccgtgatgcatgaggctctgcacaaccactacacacagaagagcctctccctgtctctgggtaaagctagctga

SEQ ID NO: 48 - DNA, 717 bp, Artificial Sequence
  Description of Artificial Sequence: Synthetic polynucleotide
atgggcatcaagatggagtcacagattcaggcatttgtattcgtgtttctctggttgtctggtgttggcggagacattgtgatgacccagtctcacaaattcatgtccacatcagtaggagacagggtcagcgtcacctgcaaggccagtcaggatgtgacttctgctgtagcctggtatcaacaaaaaccagggcaatctcctaaactactgatttactgggcatccacccggcacactggagtccctgatcgcttcacaggcagtggatctgggacagattatactctcaccatcagcagtgggcaggctgaagacctggcactttattactgtcaccaatattatagcgctcctcggacgttcggtggaggcaccaagctcgagatcaaacgaactgtggctgcaccatctgtcttcatcttcccgccatctgatgagcagttgaaatctggaactgcctctgttgtgtgcctgctgaataacttctatcccagagaggccaaagtacagtggaaggtggataacgccctccaatcgggtaactcccaggagagtgtcacagagcaggacagcaaggacagcacctacagcctcagcagcaccctgacgctgagcaaagcagactacgagaaacacaaagtctatgcctgcgaagtcacccatcagggcctgagctcgcccgtcacaaagagcttcaacaggggagagtgttag

SEQ ID NO: 49 - DNA, 1401 bp, Artificial Sequence
  Description of Artificial Sequence: Synthetic polynucleotide
atggctgtcctggcactactcctctgcctggtggctttcccaacttgtaccctgtcccaggtgcaactgaaggagtcaggacctggcctggtggcgccctcacagagcctgtccattacctgctctgtctctgggttctcattaagcaactatgatataagctggattcgccagccaccaggaaagggtctggagtggcttggagtaatgtggactggtggaggcgcaaattataattcagctttcatgtccagactgagcatcaacaaggacaactccaagagccaagtttttttaaaaatgaacaatctgcaaactgatgacacagccatttattactgtgtcagagatgcggtgaggtactggaacttcgatgtctggggcgcagggaccacggtcaccgtctcctcagccaaaacgaagggcccatccgtcttccccctggcgccctgctccaggagcacctccgagagcacagccgccctgggctgcctggtcaaggactacttccccgaaccggtgacggtgtcgtggaactcaggcgccctgaccagcggcgtgcacaccttcccggctgtcctacagtcctcaggactctactccctcagcagcgtggtgaccgtgccctccagcagcttgggcacgaagacctacacctgcaacgtagatcacaagcccagcaacaccaaggtggacaagagagttgagtccaaatatggtcccccatgcccaccctgcccagcacctgagttcgaagggggaccatcagtcttcctgttccccccaaaacccaaggacactctcatgatctcccggacccctgaggtcacgtgcgtggtggtggacgtgagccaggaagaccccgaggtccagttcaactggtacgtggatggcgtggaggtgcataatgccaagacaaagccgcgggaggagcagttcaacagcacgtaccgtgtggtcagcgtcctcaccgtcctgcaccaggactggctgaacggcaaggagtacaagtgcaaggtctccaacaaaggcctcccgtcctccatcgagaaaaccatctccaaagccaaagggcagccccgagagccacaggtgtacaccctgcccccatcccaggaggagatgaccaagaaccaggtcagcctgacctgcctggtcaaaggcttctaccccagcgacatcgccgtggagtgggagagcaatgggcagccggagaacaactacaagaccacgcctcccgtgctggactccgacggctccttcttcctctacagcaggctaaccgtggacaagagcaggtggcaggaggggaatgtcttctcatgctccgtgatgcatgaggctctgcacaaccactacacacagaagagcctctccctgtctctgggtaaagctagctga

SEQ ID NO: 50 - DNA, 708 bp, Artificial Sequence
  Description of Artificial Sequence: Synthetic polynucleotide
atggattttcaagcgcagattttcagcttcctgctaatcagtgcttcagtcataatgtccagaggacaaattgttctctcccagtcaccagcaatcctgtctgcatctccaggggagaaggtcacaatgacttgcagggccagctcaagtgtaagttacatacactggtaccagcagaagccaggatcctcccccaaaccctggatttatgccacatcccacctggcttctggagtccctgctcgcttcagtggcagtgggtctgggacctcttactctctcacaatcagcagagtggaggctgaagatactgccacttattactgccagcagtggagtagtaacccattcacgttcggctcggggacaaagctcgagatcaaacgaactgtggctgcaccatctgtcttcatcttcccgccatctgatgagcagttgaaatctggaactgcctctgttgtgtgcctgctgaataacttctatcccagagaggccaaagtacagtggaaggtggataacgccctccaatcgggtaactcccaggagagtgtcacagagcaggacagcaaggacagcacctacagcctcagcagcaccctgacgctgagcaaagcagactacgagaaacacaaagtctatgcctgcgaagtcacccatcagggcctgagctcgcccgtcacaaagagcttcaacaggggagagtgttag

SEQ ID NO: 51 - DNA, 1410 bp, Artificial Sequence
  Description of Artificial Sequence: Synthetic polynucleotide
atggaaaggcactggatctttctactcctgttgtcagtaactgcaggtgtccactcccaggtccagctgcagcagtctggggctgaactggcaagacctggggcctcagtgaagatgtcctgcaaggcttctggctacacctttactacctacactatgcactgggtaaaacagaggcctggacagggtctggaatggattggatacattaatcctagcagtggttatactaattacaatcagaagttcaaggacaaggccacattgactgcagacaaatcctccagcacagcctccatgcaactgagcagcctgacatctgaggactctgcagtctattactgtgcaagagagagggcggtattagtcccctatgctatggactactggggtcaaggaacctcagtcaccgtctcctcagccaaaacaaagggcccatccgtcttccccctggcgccctgctccaggagcacctccgagagcacagccgccctgggctgcctggtcaaggactacttccccgaaccggtgacggtgtcgtggaactcaggcgccctgaccagcggcgtgcacaccttcccggctgtcctacagtcctcaggactctactccctcagcagcgtggtgaccgtgccctccagcagcttgggcacgaagacctacacctgcaacgtagatcacaagcccagcaacaccaaggtggacaagagagttgagtccaaatatggtcccccatgcccaccctgcccagcacctgagttcgaagggggaccatcagtcttcctgttccccccaaaacccaaggacactctcatgatctcccggacccctgaggtcacgtgcgtggtggtggacgtgagccaggaagaccccgaggtccagttcaactggtacgtggatggcgtggaggtgcataatgccaagacaaagccgcgggaggagcagttcaacagcacgtaccgtgtggtcagcgtcctcaccgtcctgcaccaggactggctgaacggcaaggagtacaagtgcaaggtctccaacaaaggcctcccgtcctccatcgagaaaaccatctccaaagccaaagggcagccccgagagccacaggtgtacaccctgcccccatcccaggaggagatgaccaagaaccaggtcagcctgacctgcctggtcaaaggcttctaccccagcgacatcgccgtggagtgggagagcaatgggcagccggagaacaactacaagaccacgcctcccgtgctggactccgacggctccttcttcctctacagcaggctaaccgtggacaagagcaggtggcaggaggggaatgtcttctcatgctccgtgatgcatgaggctctgcacaaccactacacacagaagagcctctccctgtctctgggtaaagctagctga

SEQ ID NO: 52 - DNA, 708 bp, Artificial Sequence
  Description of Artificial Sequence: Synthetic polynucleotide
atgcattttcaagtgcagattttcagcttcctgctaatcagtgcctcagtcataatgtccagaggacaaattgttctcacccagtctccagcagtcatgtctgcatctccaggggagaaggtcaccataacctgcactgccagctcaagtttaagttacatgcactggttccagcagaagccaggcacttctcccaaactctggctttatagcacatccatcctggcttctggagtccctactcgcttcagtggcagtggatctgggacctcttactctctcacaatcagccgaatggaggctgaagatgctgccacttattactgccagcaaaggagtagttccccattcacgttcggctcggggacaaagctcgagatcaaacgaactgtggctgcaccatctgtcttcatcttcccgccatctgatgagcagttgaaatctggaactgcctctgttgtgtgcctgctgaataacttctatcccagagaggccaaagtacagtggaaggtggataacgccctccaatcgggtaactcccaggagagtgtcacagagcaggacagcaaggacagcacctacagcctcagcagcaccctgacgctgagcaaagcagactacgagaaacacaaagtctatgcctgcgaagtcacccatcagggcctgagctcgcccgtcacaaagagcttcaacaggggagagtgttag

SEQ ID NO: 53 - DNA, 1404 bp, Artificial Sequence
  Description of Artificial Sequence: Synthetic polynucleotide
atgggatggacctggatctttattttaatcctgtcagttactacaggtgtccactctgaggtccagctgcagcagtctggacctgagctggagaagcctggcgcttcagtgaagatatcctgcaaggcttctggttactccttcactggctacaacatgaactgggtgaaacagagcaatggaaagagccttgagtggattggaaatattgatccttactatggtgatactaactacaaccagaagttcaagggcaaggccacattgactgtagacaaatcctccagcacagcctacatgcacctcaagagcctgacatctgaggactctgcagtctattactgtgcaagaccctacggtagtgaggcctactttgcttactggggccaagggactctggtcactgtctctgcagccaaaacgaagggcccatccgtcttccccctggcgccctgctccaggagcacctccgagagcacagccgccctgggctgcctggtcaaggactacttccccgaaccggtgacggtgtcgtggaactcaggcgccctgaccagcggcgtgcacaccttcccggctgtcctacagtcctcaggactctactccctcagcagcgtggtgaccgtgccctccagcagcttgggcacgaagacctacacctgcaacgtagatcacaagcccagcaacaccaaggtggacaagagagttgagtccaaatatggtcccccatgcccaccctgcccagcacctgagttcgaagggggaccatcagtcttcctgttccccccaaaacccaaggacactctcatgatctcccggacccctgaggtcacgtgcgtggtggtggacgtgagccaggaagaccccgaggtccagttcaactggtacgtggatggcgtggaggtgcataatgccaagacaaagccgcgggaggagcagttcaacagcacgtaccgtgtggtcagcgtcctcaccgtcctgcaccaggactggctgaacggcaaggagtacaagtgcaaggtctccaacaaaggcctcccgtcctccatcgagaaaaccatctccaaagccaaagggcagccccgagagccacaggtgtacaccctgcccccatcccaggaggagatgaccaagaaccaggtcagcctgacctgcctggtcaaaggcttctaccccagcgacatcgccgtggagtgggagagcaatgggcagccggagaacaactacaagaccacgcctcccgtgctggactccgacggctccttcttcctctacagcaggctaaccgtggacaagagcaggtggcaggaggggaatgtcttctcatgctccgtgatgcatgaggctctgcacaaccactacacacagaagagcctctccctgtctctgggtaaagctagctga

SEQ ID NO: 54 - DNA, 705 bp, Artificial Sequence
  Description of Artificial Sequence: Synthetic polynucleotide
atggtgtccacttctcagctccttggacttttgcttttctggacttcagcctccagatgtgacattgtgatgactcagtctccagccaccctgtctgtgactccaggagatagagtctctctttcctgcagggccagccagagtattagcgactacttacactggtatcaacaaaaatcacatgagtctccaaggcttctcatcaaatatgctgcccaatccatctctgggatcccctccaggttcagtggcagtggatcagggtcagatttcactctcagtatcaacggtgtggaacctgaagatgttggagtgtattactgtcaaaatggtcacagctttccgtacacgttcggaggggggaccaagctcgagatcaaacgaactgtggctgcaccatctgtcttcatcttcccgccatctgatgagcagttgaaatctggaactgcctctgttgtgtgcctgctgaataacttctatcccagagaggccaaagtacagtggaaggtggataacgccctccaatcgggtaactcccaggagagtgtcacagagcaggacagcaaggacagcacctacagcctcagcagcaccctgacgctgagcaaagcagactacgagaaacacaaagtctatgcctgcgaagtcacccatcagggcctgagctcgcccgtcacaaagagcttcaacaggggagagtgttag

SEQ ID NO: 55 - DNA, 1395 bp, Artificial Sequence
  Description of Artificial Sequence: Synthetic polynucleotide
atggaatggaggatctttctcttcatcctgtcaggaactgcaggtgtccactcccaggttcagctgcggcagtctggacctgagctggtgaagcctggggcttcagtgaagatgtcctgcaaggcttctggatacacatttactgactatgttataagttgggtgaagcagagaactggacagggccttgagtggattggagatatttatcctggaagtggttattctttctacaatgagaacttcaagggcaaggccacactgactgcagacaaatcctccaccacagcctacatgcagctcagcagcctgacatctgaggactctgcggtctatttctgtgcaacctactataactacccttttgcttactggggccaagggactctggtcactgtctctgcagccaaaacaacgggcccatccgtcttccccctggcgccctgctccaggagcacctccgagagcacagccgccctgggctgcctggtcaaggactacttccccgaaccggtgacggtgtcgtggaactcaggcgccctgaccagcggcgtgcacaccttcccggctgtcctacagtcctcaggactctactccctcagcagcgtggtgaccgtgccctccagcagcttgggcacgaagacctacacctgcaacgtagatcacaagcccagcaacaccaaggtggacaagagagttgagtccaaatatggtcccccatgcccaccctgcccagcacctgagttcgaagggggaccatcagtcttcctgttccccccaaaacccaaggacactctcatgatctcccggacccctgaggtcacgtgcgtggtggtggacgtgagccaggaagaccccgaggtccagttcaactggtacgtggatggcgtggaggtgcataatgccaagacaaagccgcgggaggagcagttcaacagcacgtaccgtgtggtcagcgtcctcaccgtcctgcaccaggactggctgaacggcaaggagtacaagtgcaaggtctccaacaaaggcctcccgtcctccatcgagaaaaccatctccaaagccaaagggcagccccgagagccacaggtgtacaccctgcccccatcccaggaggagatgaccaagaaccaggtcagcctgacctgcctggtcaaaggcttctaccccagcgacatcgccgtggagtgggagagcaatgggcagccggagaacaactacaagaccacgcctcccgtgctggactccgacggctccttcttcctctacagcaggctaaccgtggacaagagcaggtggcaggaggggaatgtcttctcatgctccgtgatgcatgaggctctgcacaaccactacacacagaagagcctctccctgtctctgggtaaagctagctga

SEQ ID NO: 56 - DNA, 717 bp, Artificial Sequence
  Description of Artificial Sequence: Synthetic polynucleotide
atgaagttgcctgttaggctgttggtgctgatgttctggattcctgcttccagcagtgatgttgtgatgacccaaactccactctccctgcctgtccgtcttggagatcaagcctccatctcttgcagatctagtcagagccttgtacacagtaatggaaacacctatttacattggtacctgcagaagccaggccagtctccaaagctcctgatctacaaagtttccaaccgattttctggggtcccagacaggttcagtggcagtggatcagggacaaatttcacactcaagatcagcagagtggaggctgaggatctgggactttatttctgctctcaaagtacacatgttccgtacacgttcggaggggggaccaagctcgagatcaaacgaactgtggctgcaccatctgtcttcatcttcccgccatctgatgagcagttgaaatctggaactgcctctgttgtgtgcctgctgaataacttctatcccagagaggccaaagtacagtggaaggtggataacgccctccaatcgggtaactcccaggagagtgtcacagagcaggacagcaaggacagcacctacagcctcagcagcaccctgacgctgagcaaagcagactacgagaaacacaaagtctatgcctgcgaagtcacccatcagggcctgagctcgcccgtcacaaagagcttcaacaggggagagtgttag

SEQ ID NO: 57 - DNA, 1410 bp, Artificial Sequence
  Description of Artificial Sequence: Synthetic polynucleotide
atgacattgaacatgctgttggggctgaggtgggttttctttgttgttttttatcaaggtgtgcattgtgaggtgcagcttgttgagtctggtggaggattggtgcagcctaaagggtcattgaaactctcatgtgcagcctctggattaaccttcaatatctacgccatgaactgggtccgccaggctccaggaaagggtttggaatgggttgctcgcataagaaataaaagtaataattatgcaacatattatgccgattcagtgaaagacaggttcaccatctccagagatgattcacaaagcttgctctatctgcaaatgaacaacttgaaaactgaggacacagccatgtattactgtgtgggacgggactggtttgattactggggccaagggactctggtcactgtctctgcagccaaaacgaagggcccatccgtcttccccctggcgccctgctccaggagcacctccgagagcacagccgccctgggctgcctggtcaaggactacttccccgaaccggtgacggtgtcgtggaactcaggcgccctgaccagcggcgtgcacaccttcccggctgtcctacagtcctcaggactctactccctcagcagcgtggtgaccgtgccctccagcagcttgggcacgaagacctacacctgcaacgtagatcacaagcccagcaacaccaaggtggacaagagagttgagtccaaatatggtcccccatgcccaccctgcccagcacctgagttcgaagggggaccatcagtcttcctgttccccccaaaacccaaggacactctcatgatctcccggacccctgaggtcacgtgcgtggtggtggacgtgagccaggaagaccccgaggtccagttcaactggtacgtggatggcgtggaggtgcataatgccaagacaaagccgcgggaggagcagttcaacagcacgtaccgtgtggtcagcgtcctcaccgtcctgcaccaggactggctgaacggcaaggagtacaagtgcaaggtctccaacaaaggcctcccgtcctccatcgagaaaaccatctccaaagccaaagggcagccccgagagccacaggtgtacaccctgcccccatcccaggaggagatgaccaagaaccaggtcagcctgacctgcctggtcaaaggcttctaccccagcgacatcgccgtggagtgggagagcaatgggcagccggagaacaactacaagaccacgcctcccgtgctggactccgacggctccttcttcctctacagcaggctaaccgtggacaagagcaggtggcaggaggggaatgtcttctcatgctccgtgatgcatgaggctctgcacaaccactacacacagaagagcctctccctgtctctgggtaaagctagctga

SEQ ID NO: 58 - DNA, 708 bp, Artificial Sequence
  Description of Artificial Sequence: Synthetic polynucleotide
atggcctggatttcacttatactctctctcctggctctcagctcaggggccatttcccaggctgttgtgactcaggaatctgcactcaccacatcacctggtgaaacagtcacactcacttgtcgctcaagtactggggctgttacaactagtaactatgccaactgggtccaagaaaaaccagatcatttattcactggtctaataggtggtaccaacaaccgagtttcaggtgttcctgccagattctcaggctccctgattggagacaaggctgccctcaccatcacaggggcacagactgaggatgaggcaatatatttctgtgctctatggtacagcaaccattgggtgttcggtggaggaaccaaactcgagatcaaacgaactgtggctgcaccatctgtcttcatcttcccgccatctgatgagcagttgaaatctggaactgcctctgttgtgtgcctgctgaataacttctatcccagagaggccaaagtacagtggaaggtggataacgccctccaatcgggtaactcccaggagagtgtcacagagcaggacagcaaggacagcacctacagcctcagcagcaccctgacgctgagcaaagcagactacgagaaacacaaagtctatgcctgcgaagtcacccatcagggcctgagctcgcccgtcacaaagagcttcaacaggggagagtgttag

SEQ ID NO: 59 - DNA, 1386 bp, Artificial Sequence
  Description of Artificial Sequence: Synthetic polynucleotide
atggaatggacctgggtctttctcttcctcctgtcagtaactgcaggtgtccactcccaggttcagctgcagcagtctggagctgagctgatgaagcctggggcctcagtgaagatatcctgcaaggctactggctacacattcggtagctactggatagagtgggtaaagcagaggcctggacatggccttgagtggattggagagattttacctggaagtggtaatactaactacaatgagaacttcaagggcaaggccacattcactgcagatacatcctccaacacagcctacatgcaactcaccagtctgacatctgaggactctgccgtctattactgtgctagggcggggatttattggggccaagggactctggtcactgtctctgcagccaaaacgaagggcccatccgtcttccccctggcgccctgctccaggagcacctccgagagcacagccgccctgggctgcctggtcaaggactacttccccgaaccggtgacggtgtcgtggaactcaggcgccctgaccagcggcgtgcacaccttcccggctgtcctacagtcctcaggactctactccctcagcagcgtggtgaccgtgccctccagcagcttgggcacgaagacctacacctgcaacgtagatcacaagcccagcaacaccaaggtggacaagagagttgagtccaaatatggtcccccatgcccaccctgcccagcacctgagttcgaagggggaccatcagtcttcctgttccccccaaaacccaaggacactctcatgatctcccggacccctgaggtcacgtgcgtggtggtggacgtgagccaggaagaccccgaggtccagttcaactggtacgtggatggcgtggaggtgcataatgccaagacaaagccgcgggaggagcagttcaacagcacgtaccgtgtggtcagcgtcctcaccgtcctgcaccaggactggctgaacggcaaggagtacaagtgcaaggtctccaacaaaggcctcccgtcctccatcgagaaaaccatctccaaagccaaagggcagccccgagagccacaggtgtacaccctgcccccatcccaggaggagatgaccaagaaccaggtcagcctgacctgcctggtcaaaggcttctaccccagcgacatcgccgtggagtgggagagcaatgggcagccggagaacaactacaagaccacgcctcccgtgctggactccgacggctccttcttcctctacagcaggctaaccgtggacaagagcaggtggcaggaggggaatgtcttctcatgctccgtgatgcatgaggctctgcacaaccactacacacagaagagcctctccctgtctctgggtaaagctagctga

SEQ ID NO: 60 - DNA, 717 bp, Artificial Sequence
  Description of Artificial Sequence: Synthetic polynucleotide
atggagaaagacacactcctgctatgggtcctgcttctctgggttccaggttccacaggtgacattgtgctgacccaatctccagcttttttggctgtgtctctagggcagagggccaccatctcctgcagagccagcgaaagtgttgataattatggcattagttttatgaactggttccaacagaaaccaggacagccacccaaactcctcatctatgttgcatccaagcaaggatccggggtccctgccaggtttagtggcagtgggtctgggacagacttcagcctcaacatccatcctatggaggaggatgatactgcaatgtatttctgtcagcaaagtaaggaggttcctcggacgttcggtggaggcaccaagctcgagatcaaacgaactgtggctgcaccatctgtcttcatcttcccgccatctgatgagcagttgaaatctggaactgcctctgttgtgtgcctgctgaataacttctatcccagagaggccaaagtacagtggaaggtggataacgccctccaatcgggtaactcccaggagagtgtcacagagcaggacagcaaggacagcacctacagcctcagcagcaccctgacgctgagcaaagcagactacgagaaacacaaagtctatgcctgcgaagtcacccatcagggcctgagctcgcccgtcacaaagagcttcaacaggggagagtgttag

SEQ ID NO: 61 - DNA, 1392 bp, Artificial Sequence
  Description of Artificial Sequence: Synthetic polynucleotide
atggaatgtaactggatacttccttttattctgtcggtaacttcaggggtctactcagaggttcagctccagcagtctgggactgtgctggcaaggcctggggcttcagtgaagatgtcctgcaaggcttctggctacacctttaccagctactggatgcactgggtaaaacagaggcctggacagggtctggaatggattggcgctatttatcctggaaatagtgatactacctacaaccagaagttcaagggcaaggccaaactgactgcagtcacatccaccagcactgcctacatggagctcagcagcctgacaaatgaggactctgcggtctattactgtacacctacttactactttgactactggggccaaggcacctctctcacagtctcctcagccaaaacgaagggcccatccgtcttccccctggcgccctgctccaggagcacctccgagagcacagccgccctgggctgcctggtcaaggactacttccccgaaccggtgacggtgtcgtggaactcaggcgccctgaccagcggcgtgcacaccttcccggctgtcctacagtcctcaggactctactccctcagcagcgtggtgaccgtgccctccagcagcttgggcacgaagacctacacctgcaacgtagatcacaagcccagcaacaccaaggtggacaagagagttgagtccaaatatggtcccccatgcccaccctgcccagcacctgagttcgaagggggaccatcagtcttcctgttccccccaaaacccaaggacactctcatgatctcccggacccctgaggtcacgtgcgtggtggtggacgtgagccaggaagaccccgaggtccagttcaactggtacgtggatggcgtggaggtgcataatgccaagacaaagccgcgggaggagcagttcaacagcacgtaccgtgtggtcagcgtcctcaccgtcctgcaccaggactggctgaacggcaaggagtacaagtgcaaggtctccaacaaaggcctcccgtcctccatcgagaaaaccatctccaaagccaaagggcagccccgagagccacaggtgtacaccctgcccccatcccaggaggagatgaccaagaaccaggtcagcctgacctgcctggtcaaaggcttctaccccagcgacatcgccgtggagtgggagagcaatgggcagccggagaacaactacaagaccacgcctcccgtgctggactccgacggctccttcttcctctacagcaggctaaccgtggacaagagcaggtggcaggaggggaatgtcttctcatgctccgtgatgcatgaggctctgcacaaccactacacacagaagagcctctccctgtctctgggtaaagctagctga

SEQ ID NO: 62 - DNA, 717 bp, Artificial Sequence
  Description of Artificial Sequence: Synthetic polynucleotide
atgagtcctgcccaattcctgtttctgttagtgctctggattcgggaaaccaacggtgatgttgtgatgacccagactccactcactttgtcggttaccattggacaaccagcctccatctcttgcaagtcaagtcagagcctcttagatagtgatggaaagacatatttgaattggttcttacagaggccaggccagtctccaaagcgcctaatctatctggtgtctaaactggactctggagtccctgacaggttcactggcagtggatcagggacagatttcacactgaaaatcagcagagtggaggctgaggatttgggagtttattattgctggcaaggtacacattttccgtggacgttcggtggaggcaccaagctcgagatcaaacgaactgtggctgcaccatctgtcttcatcttcccgccatctgatgagcagttgaaatctggaactgcctctgttgtgtgcctgctgaataacttctatcccagagaggccaaagtacagtggaaggtggataacgccctccaatcgggtaactcccaggagagtgtcacagagcaggacagcaaggacagcacctacagcctcagcagcaccctgacgctgagcaaagcagactacgagaaacacaaagtctatgcctgcgaagtcacccatcagggcctgagctcgcccgtcacaaagagcttcaacaggggagagtgttag

SEQ ID NO: 63 - DNA, 1415 bp, Artificial Sequence
  Description of Artificial Sequence: Synthetic polynucleotide
atgggagggatctggatctttctcttcctcctgtcaggaactgcaggtgcccactctgagatccagctgcagcagactggacctgagctggtgaagcctggggcttcagtgaagatatcctgcaaggcttctggttatccattcactgactacatcatggtctgggtgaagcagagccatggaaagagccttgagtggattggaaatattagtccttactatggtactactaactacaatctgaagttcaagggcaaggccacattgactgtagacaaatcttccagcacagcctacatgcagctcaacagtctgacatctgaggactctgcagtctattactgtgcaagatcccctaactgggacggggcctggtttgctcactggggccaaggggctctggtcactgtctctgcagccaaaacaaagggcccatccgtcttccccctggcgccctgctccaggagcacctccgagagcacagccgccctgggctgcctggtcaaggactacttccccgaaccggtgacggtgtcgtggaactcaggcgccctgaccagcggcgtgcacaccttcccggctgtcctacagtcctcaggactctactccctcagcagcgtggtgaccgtgccctccagcagcttgggcacgaagacctacacctgcaacgtagatcacaagcccagcaacaccaaggtggacaagagagttgagtccaaatatggtcccccatgcccaccctgcccagcacctgagttcgaagggggaccatcagtcttcctgttccccccaaaacccaaggacactctcatgatctcccggacccctgaggtcacgtgcgtggtggtggacgtgagccaggaagaccccgaggtccagttcaactggtacgtggatggcgtggaggtgcataatgccaagacaaagccgcgggaggagcagttcaacagcacgtaccgtgtggtcagcgtcctcaccgtcctgcaccaggactggctgaacggcaaggagtacaagtgcaaggtctccaacaaaggcctcccgtcctccatcgagaaaaccatctccaaagccaaagggcagccccgagagccacaggtgtacaccctgcccccatcccaggaggagatgaccaagaaccaggtcagcctgacctgcctggtcaaaggcttctaccccagcgacatcgccgtggagtgggagagcaatgggcagccggagaacaactacaagaccacgcctcccgtgctggactccgacggctccttcttcctctacagcaggctaaccgtggacaagagcaggtggcaggaggggaatgtcttctcatgctccgtgatgcatgaggctctgcacaaccactacacacagaagagcctctccctgtctctgggtaaagctagctgattaattaa

SEQ ID NO: 64 - DNA, 717 bp, Artificial Sequence
  Description of Artificial Sequence: Synthetic polynucleotide
atggagacagacacaatcctgctatgggtgctgctgctctgggttccaggctccactggtgacattgtgctgacccaatctccagcttctttggctgtgtctctagggcagagggccaccatctcctgcaaggccagccaaagtgttgattatgatggtgatagttatatgaactggttccaacagaaaccaggacagccacccaaactcctcatctatgctgcatccaatctagaatctgggatcccagccaggtttagtggcagtgggtctgggacagacttcaccctcaacatccatcctgtggaggaggaggatgctgcaacctattactgtcagcaaagtaatgaggatccattcacgttcggctcggggacaaagctcgagatcaaacgaactgtggctgcaccatctgtcttcatcttcccgccatctgatgagcagttgaaatctggaactgcctctgttgtgtgcctgctgaataacttctatcccagagaggccaaagtacagtggaaggtggataacgccctccaatcgggtaactcccaggagagtgtcacagagcaggacagcaaggacagcacctacagcctcagcagcaccctgacgctgagcaaagcagactacgagaaacacaaagtctatgcctgcgaagtcacccatcagggcctgagctcgcccgtcacaaagagcttcaacaggggagagtgttag

SEQ ID NO: 65 - DNA, 1403 bp, Artificial Sequence
  Description of Artificial Sequence: Synthetic polynucleotide
atggctgtcctggggctgcttctctgcctggtgacgttcccaagctgtgtcctgtcccaggtgcagctgaaggagtcaggacctggcctggtggcaccctcacagagcctgtccatcacatgcactgtctctgggttctcattatccagatatagtgtattttgggttcgccagcctccaggaaagggtctggagtggctgggattgatatggggtggtggaagcacagactataattcagctctcaaatccagactgagcatcagcaaggacaactccaagagccaagttttcttaaaaatgaacagtctgcaaactgatgacacagccatgtactactgtgccagaatctactttgattacgacggggctatggactactggggtcaaggaacctcagtcaccgtctcctcagccaaaacaacgggcccatccgtcttccccctggcgccctgctccaggagcacctccgagagcacagccgccctgggctgcctggtcaaggactacttccccgaaccggtgacggtgtcgtggaactcaggcgccctgaccagcggcgtgcacaccttcccggctgtcctacagtcctcaggactctactccctcagcagcgtggtgaccgtgccctccagcagcttgggcacgaagacctacacctgcaacgtagatcacaagcccagcaacaccaaggtggacaagagagttgagtccaaatatggtcccccatgcccaccctgcccagcacctgagttcgaagggggaccatcagtcttcctgttccccccaaaacccaaggacactctcatgatctcccggacccctgaggtcacgtgcgtggtggtggacgtgagccaggaagaccccgaggtccagttcaactggtacgtggatggcgtggaggtgcataatgccaagacaaagccgcgggaggagcagttcaacagcacgtaccgtgtggtcagcgtcctcaccgtcctgcaccaggactggctgaacggcaaggagtacaagtgcaaggtctccaacaaaggcctcccgtcctccatcgagaaaaccatctccaaagccaaagggcagccccgagagccacaggtgtacaccctgcccccatcccaggaggagatgaccaagaaccaggtcagcctgacctgcctggtcaaaggcttctaccccagcgacatcgccgtggagtgggagagcaatgggcagccggagaacaactacaagaccacgcctcccgtgctggactccgacggctccttcttcctctacagcaggctaaccgtggacaagagcaggtggcaggaggggaatgtcttctcatgctccgtgatgcatgaggctctgcacaaccactacacacagaagagcctctccctgtctctgggtaaagctagctg

SEQ ID NO: 66 - DNA, 732 bp, Artificial Sequence
  Description of Artificial Sequence: Synthetic polynucleotide
atgcatcgcaccagcatgggcatcaagatggagtcacggattcaggcatttgtattcgtgtttctctggttgtctggtgttggcggagacattgtgatgacccagtctcacaaattcatgtccacatcagtaggagacagggtcagcgtcacctgcaaggccagtcaggatgtgacttctgctgtagcctggtatcaacaaaaaccagggcaatctcctaaactactgatttactgggcatccacccggcacactggagtccctgatcgcttcacaggcagtggatctgggacagattatactctcaccatcagcagtgggcaggctgaagacctggcactttattactgtcaccaatattatagcgctcctcggacgttcggtggaggcaccaagctcgagatcaaacgaactgtggctgcaccatctgtcttcatcttcccgccatctgatgagcagttgaaatctggaactgcctctgttgtgtgcctgctgaataacttctatcccagagaggccaaagtacagtggaaggtggataacgccctccaatcgggtaactcccaggagagtgtcacagagcaggacagcaaggacagcacctacagcctcagcagcaccctgacgctgagcaaagcagactacgagaaacacaaagtctatgcctgcgaagtcacccatcagggcctgagctcgcccgtcacaaagagcttcaacaggggagagtgttag

SEQ ID NO: 67 - DNA, 1404 bp, Artificial Sequence
  Description of Artificial Sequence: Synthetic polynucleotide
atggaatggaactgggtcgttctcttcctcctgtcattaactgcaggtgtctatgcccagggtcagatgcagcagtctggagctgagctggtgaagcctggggcttcagtgaagctgtcctgcaagacttctggcttcaccttcagcagtaactatataagttggttgaagcaaaagcctggacagagtcttgagtggattgcatggatttatgctggaactggtggtattacctataatcagaagttcagaggcagggcccaactgactgtagacacatcctccagcacagcctacatgcagttcagcagcctgacaactgatgactctgccatctattactgtgcaagacacgtgaggggttaccatcctatggactactggggtcaaggaacctcagtcaccgtctcctcagccaaaacgaagggcccatccgtcttccccctggcgccctgctccaggagcacctccgagagcacagccgccctgggctgcctggtcaaggactacttccccgaaccggtgacggtgtcgtggaactcaggcgccctgaccagcggcgtgcacaccttcccggctgtcctacagtcctcaggactctactccctcagcagcgtggtgaccgtgccctccagcagcttgggcacgaagacctacacctgcaacgtagatcacaagcccagcaacaccaaggtggacaagagagttgagtccaaatatggtcccccatgcccaccctgcccagcacctgagttcgaagggggaccatcagtcttcctgttccccccaaaacccaaggacactctcatgatctcccggacccctgaggtcacgtgcgtggtggtggacgtgagccaggaagaccccgaggtccagttcaactggtacgtggatggcgtggaggtgcataatgccaagacaaagccgcgggaggagcagttcaacagcacgtaccgtgtggtcagcgtcctcaccgtcctgcaccaggactggctgaacggcaaggagtacaagtgcaaggtctccaacaaaggcctcccgtcctccatcgagaaaaccatctccaaagccaaagggcagccccgagagccacaggtgtacaccctgcccccatcccaggaggagatgaccaagaaccaggtcagcctgacctgcctggtcaaaggcttctaccccagcgacatcgccgtggagtgggagagcaatgggcagccggagaacaactacaagaccacgcctcccgtgctggactccgacggctccttcttcctctacagcaggctaaccgtggacaagagcaggtggcaggaggggaatgtcttctcatgctccgtgatgcatgaggctctgcacaaccactacacacagaagagcctctccctgtctctgggtaaagctagctga

SEQ ID NO: 68 - DNA, 705 bp, Artificial Sequence
  Description of Artificial Sequence: Synthetic polynucleotide
atggagtcacagactcaggtctttgtatacatgttgctgtggttgtctggtgttgatggagacattgtgatgacccagtctcaaaaattcatgtccgcatcagtaggggacagggtcagcgtcacctgcagggccagtcagaatgtggttactaatgtaggctggtatcaacagaaaccagggcaatctcctaaagtactgatttactcggcatccttccggtacagtggagtccctgatcgcttcacaggcagtggatctgggacagatttcactctcaccatcaccaatgtgcagtctgaagacttggcagagtatttctgtcagcaatataacaactatccgtacacgttcggaggggggaccaagctcgagatcaaacgaactgtggctgcaccatctgtcttcatcttcccgccatctgatgagcagttgaaatctggaactgcctctgttgtgtgcctgctgaataacttctatcccagagaggccaaagtacagtggaaggtggataacgccctccaatcgggtaactcccaggagagtgtcacagagcaggacagcaaggacagcacctacagcctcagcagcaccctgacgctgagcaaagcagactacgagaaacacaaagtctatgcctgcgaagtcacccatcagggcctgagctcgcccgtcacaaagagcttcaacaggggagagtgttag

SEQ ID NO: 69 - DNA, 1407 bp, Artificial Sequence
  Description of Artificial Sequence: Synthetic polynucleotide
atgggatggagctatatcatcctctttttggtagcaacagctacagatgtccactcccaggtccaactgcagcagcctggggctgaactggtgaagcctggggcttcagtgaagctgtcctgcaaggcttctggctacaccttcaccagctactggatgcactgggtgaagcagaggcctggagaaggccttgagtggattggagagattaatcctagctacggtcgtactgactacaatgggaagttcaagaacaaggccacactgactgtagccaaatcctccagcacagcctacatgcaactcagcagcctgacatctgaggactctgcggtctattactgtgcaagaggagattactacggtagtagctcgtttgcttactggggccaagggactctggtcactgtctctgcagccaaaacaaagggcccatccgtcttccccctggcgccctgctccaggagcacctccgagagcacagccgccctgggctgcctggtcaaggactacttccccgaaccggtgacggtgtcgtggaactcaggcgccctgaccagcggcgtgcacaccttcccggctgtcctacagtcctcaggactctactccctcagcagcgtggtgaccgtgccctccagcagcttgggcacgaagacctacacctgcaacgtagatcacaagcccagcaacaccaaggtggacaagagagttgagtccaaatatggtcccccatgcccaccctgcccagcacctgagttcgaagggggaccatcagtcttcctgttccccccaaaacccaaggacactctcatgatctcccggacccctgaggtcacgtgcgtggtggtggacgtgagccaggaagaccccgaggtccagttcaactggtacgtggatggcgtggaggtgcataatgccaagacaaagccgcgggaggagcagttcaacagcacgtaccgtgtggtcagcgtcctcaccgtcctgcaccaggactggctgaacggcaaggagtacaagtgcaaggtctccaacaaaggcctcccgtcctccatcgagaaaaccatctccaaagccaaagggcagccccgagagccacaggtgtacaccctgcccccatcccaggaggagatgaccaagaaccaggtcagcctgacctgcctggtcaaaggcttctaccccagcgacatcgccgtggagtgggagagcaatgggcagccggagaacaactacaagaccacgcctcccgtgctggactccgacggctccttcttcctctacagcaggctaaccgtggacaagagcaggtggcaggaggggaatgtcttctcatgctccgtgatgcatgaggctctgcacaaccactacacacagaagagcctctccctgtctctgggtaaagctagctga

SEQ ID NO: 70 - DNA, 705 bp, Artificial Sequence
  Description of Artificial Sequence: Synthetic polynucleotide
atggagtcacagactcaggtctttgtatacatgttgctgtggttgtctggtgttgatggagacattgtgatgacccagtctcaaaaattcatgtccacatcattaggagacagggtcagcgtcacctgcaaggccagtcagaatgtgggtactaatgtagcctggtatcaacagaaaccagggcactctcctaaagcactgatttactcggcatcctaccggtacagtggagtccctgatcgcttcacaggcagtggatctgggacagatttcactctcaccatcagcaatgtgcagtctgaagacttggcagagtttttctgtcagcaatataacaactatccgtacacgttcggaggggggaccacgctcgagatcaaacgaactgtggctgcaccatctgtcttcatcttcccgccatctgatgagcagttgaaatctggaactgcctctgttgtgtgcctgctgaataacttctatcccagagaggccaaagtacagtggaaggtggataacgccctccaatcgggtaactcccaggagagtgtcacagagcaggacagcaaggacagcacctacagcctcagcagcaccctgacgctgagcaaagcagactacgagaaacacaaagtctatgcctgcgaagtcacccatcagggcctgagctcgcccgtcacaaagagcttcaacaggggagagtgttag

SEQ ID NO: 71 - protein, 466 aa, Artificial Sequence
  Description of Artificial Sequence: Synthetic polypeptide
MGRLTSSFLLLIVPAYVLSQVTLKESGPGILQPSQTLSLTCSFSGFSLSTSGMSVGWIRQPSGKGLEWLAHIWWNDDKYYNPVLKSRLTISKETSNNQVFLKIASVVSADTATYYCARFYGNCLDYWGQGTTLTVSSAKTKGPSVFPLAPCSRSTSESTAALGCLVKDYFPEPVTVSWNSGALTSGVHTFPAVLQSSGLYSLSSVVTVPSSSLGTKTYTCNVDHKPSNTKVDKRVESKYGPPCPPCPAPEFEGGPSVFLFPPKPKDTLMISRTPEVTCVVVDVSQEDPEVQFNWYVDGVEVHNAKTKPREEQFNSTYRVVSVLTVLHQDWLNGKEYKCKVSNKGLPSSIEKTISKAKGQPREPQVYTLPPSQEEMTKNQVSLTCLVKGFYPSDIAVEWESNGQPENNYKTTPPVLDSDGSFFLYSRLTVDKSRWQEGNVFSCSVMHEALHNHYTQKSLSLSLGKAS

SEQ ID NO: 72 - protein, 234 aa, Artificial Sequence
  Description of Artificial Sequence: Synthetic polypeptide
MMSSAQFLGLLLLCFQGTRCDIQMTQTTSSLSASLGDRVTISCRASQDISNYLNWYQQKPDGTVKLLIYYTSILQLGVPSRFSGSGSETDYSLTISNLEQEDIATYFCQQGDSLPFTFGSGTKLEIKRTVAAPSVFIFPPSDEQLKSGTASVVCLLNNFYPREAKVQWKVDNALQSGNSQESVTEQDSKDSTYSLSSTLTLSKADYEKHKVYACEVTHQGLSSPVTKSFNRGEC

SEQ ID NO: 73 - protein, 464 aa, Artificial Sequence
  Description of Artificial Sequence: Synthetic polypeptide
MRALILLCLFTAFPGILSDVQLQESGPDLVKPSQSLSLTCTVTGYSITSGYSWHWIRQFPGNKLEWMGYILFSGSTNYNPSLKSRISITRDTSKNQFFLQLNSVTTEDTATYFCARSNYGSFASWGQGTLVTVSAAKTTGPSVFPLAPCSRSTSESTAALGCLVKDYFPEPVTVSWNSGALTSGVHTFPAVLQSSGLYSLSSVVTVPSSSLGTKTYTCNVDHKPSNTKVDKRVESKYGPPCPPCPAPEFEGGPSVFLFPPKPKDTLMISRTPEVTCVVVDVSQEDPEVQFNWYVDGVEVHNAKTKPREEQFNSTYRVVSVLTVLHQDWLNGKEYKCKVSNKGLPSSIEKTISKAKGQPREPQVYTLPPSQEEMTKNQVSLTCLVKGFYPSDIAVEWESNGQPENNYKTTPPVLDSDGSFFLYSRLTVDKSRWQEGNVFSCSVMHEALHNHYTQKSLSLSLGKAS

SEQ ID NO: 74 - protein, 235 aa, Artificial Sequence
  Description of Artificial Sequence: Synthetic polypeptide
MDFQVQIFSFLLISASVIISRGQIVLTQSPAIMSASPGEKVTMTCSASSSVSHMHWYQQKSGTSPKRWIYDTSRLASGVPARFSGSGSGTSYSLTISSMEAEDAATYYCQQWSSHPWSFGGGTKLEIKRTVAAPSVFIFPPSDEQLKSGTASVVCLLNNFYPREAKVQWKVDNALQSGNSQESVTEQDSKDSTYSLSSTLTLSKADYEKHKVYACEVTHQGLSSPVTKSFNRGEC

SEQ ID NO: 75 - protein, 468 aa, Artificial Sequence
  Description of Artificial Sequence: Synthetic polypeptide
MAWVWTLLFLMAAAQSAQAQIQLVQSGPELKKPGETVKISCKASGYTFTNYGMNWVKQVPGKGLRWMGWMDTFTGEPTYADDFKGRFAFSLETSASTAYLQINSLKNEDTATYFCARGGILRLNYFDYWGQGTTLTVSSAKTKGPSVFPLAPCSRSTSESTAALGCLVKDYFPEPVTVSWNSGALTSGVHTFPAVLQSSGLYSLSSVVTVPSSSLGTKTYTCNVDHKPSNTKVDKRVESKYGPPCPPCPAPEFEGGPSVFLFPPKPKDTLMISRTPEVTCVVVDVSQEDPEVQFNWYVDGVEVHNAKTKPREEQFNSTYRVVSVLTVLHQDWLNGKEYKCKVSNKGLPSSIEKTISKAKGQPREPQVYTLPPSQEEMTKNQVSLTCLVKGFYPSDIAVEWESNGQPENNYKTTPPVLDSDGSFFLYSRLTVDKSRWQEGNVFSCSVMHEALHNHYTQKSLSLSLGKAS

SEQ ID NO: 76 - protein, 234 aa, Artificial Sequence
  Description of Artificial Sequence: Synthetic polypeptide
MKFPSQLLLLLLFGIPGMICDIQMTQSSSSFSVSLGDRVTITCKASEDIYNRLGWYQQKPGNAPRLLISGATSLETGVPSRFSGSGSGKDYALSITSLQTEDLATYYCQQCWTSPYTFGGGTKLEIKRTVAAPSVFIFPPSDEQLKSGTASVVCLLNNFYPREAKVQWKVDNALQSGNSQESVTEQDSKDSTYSLSSTLTLSKADYEKHKVYACEVTHQGLSSPVTKSFNRGEC

SEQ ID NO: 77 - protein, 464 aa, Artificial Sequence
  Description of Artificial Sequence: Synthetic polypeptide
MGWSWIFLFLLSGTGGVLSEVQLQQSGPELVKPGASVKMSCKASGYTFTDYYMKWVKQSHGKSLEWIGDINPNYGDTFYNQKFEGKATLTVDKSSRTAYMQLNSLTSEDSAVYYCGRGDYGYFDVWGAGTTVTVSSAKTKGPSVFPLAPCSRSTSESTAALGCLVKDYFPEPVTVSWNSGALTSGVHTFPAVLQSSGLYSLSSVVTVPSSSLGTKTYTCNVDHKPSNTKVDKRVESKYGPPCPPCPAPEFEGGPSVFLFPPKPKDTLMISRTPEVTCVVVDVSQEDPEVQFNWYVDGVEVHNAKTKPREEQFNSTYRVVSVLTVLHQDWLNGKEYKCKVSNKGLPSSIEKTISKAKGQPREPQVYTLPPSQEEMTKNQVSLTCLVKGFYPSDIAVEWESNGQPENNYKTTPPVLDSDGSFFLYSRLTVDKSRWQEGNVFSCSVMHEALHNHYTQKSLLSLGKAS

SEQ ID NO: 78 - protein, 234 aa, Artificial Sequence
  Description of Artificial Sequence: Synthetic polypeptide
METHSQVFVYMLLWLSGVEGDIVMTQSHKFMSTSVGDRVSITCKASQDVGTAVAWYQQKPGQSPKLLIYWASTRHTGVPDRFTGSGSGTDFTLTINNVQSEDLADYFCQQYSSNPYMFGGGTKLEIKRTVAAPSVFIFPPSDEQLKSGTASVVCLLNNFYPREAKVQWKVDNALQSGNSQESVTEQDSKDSTYSLSSTLTLSKADYEKHKVYACEVTHQGLSSPVTKSFNRGEC

SEQ ID NO: 79 - protein, 469 aa, Artificial Sequence
  Description of Artificial Sequence: Synthetic polypeptide
MGWSWIFLFLLSGTAGVLSEVQLQQSGPELVKPGASVKISCKTSGYTFTEYTMHWVRSHGKSLEWIGGINPINGGPTYNQKFKGKATLTVDKSSSTAYMELRSLTSEDSAVYYCARWDYGSRDVMDYWGQGTSVTVSSAKTKGPSVFPLAPCSRSTSESTAALGCLVKDYFPEPVPVTVSWNSGALTSGVHTFPAVLQSSGLYSLSSVVTVPSSSLGTKTYTCNVDHKPSNTKVDKRVESKYGPPCPPCPAPEFEGGPSVFLFPPKPKDTLMISRTPEVTCVVVDVSQEDPEVQFNWYVDGVEVHNAKTKPREEQFNSTYRVVSVLTVLHQDWLNGKEYKCKVSNKGLPSSIEKTISKAKGQPREPQVYTLPPSQEEMTKNQVSLTCLVKGFYPSDIAVEWESNGQPENNYKTTPPVLDSDGSFFLYSRLTVDKSRWQEGNVFSCSVMHEALHNHYTQKSLSLSLGKAS

SEQ ID NO: 80 - protein, 234 aa, Artificial Sequence
  Description of Artificial Sequence: Synthetic polypeptide
METHSQVFVYMLLWLSGVEGNIVMTQSPKSMSMSVGERVTLSCKASENVGTYVSWYQQRPEQSPKLLIYGASNRYTGVPDRFTGSGSATDFTLTISSVQAEDLADYHCGQTYSYIFTFGSGTKLEIKRTVAAPSVFIFPPSDEQLKSGTASVVCLLNNFYPREAKVQWKVDNALQSGNSQESVTEQDSKDSTYSLSSTLTLSKADYEKHKVYACEVTHQGLSSPVTKSFNRGEC

SEQ ID NO: 81 - protein, 467 aa, Artificial Sequence [sequence omitted]

SEQ ID NO: 82 - protein, 234 aa, Artificial Sequence
  Description of Artificial Sequence: Synthetic polypeptide
MSVPTQVLGLLLLWLTGARCDIQMAQSPASLSASVGETVTITCRASENIYSYLAWYQQKQGKSPQLLVYNAKTLAEGVPSRFSGSGSGTQFSLKINSLQPEDFGSYYCQHHYGFPWTFGGGTKLEIKRTVAAPSVFIFPPSDEQLKSGTASVVCLLNNFYPREAKVQWKVDNALQSGNSQESVTEQDSKDSTYSLSSTLTLSKADYEKHKVYACEVTHQGLSSPVTKSFNRGEC

SEQ ID NO: 83 - protein, 464 aa, Artificial Sequence
  Description of Artificial Sequence: Synthetic polypeptide
MNFGLSLIFLVLILKGVQCEVQLVESGGDLVKPGGSLKLSCAASGFTFSSYGMSWVRQTPDKRLEWVAVISSGGSSTFYPDSVKGRFTISRDNAKNTLYLQMSSLKSEDTAVYYCSRGGYYFDYWGQGTTLTVSAAKTKGPSVFPLAPCSRSTSESTAALGCLVKDYFPEPVTVSWNSGALTSGVHTFPAVLQSSGLYSLSSVVTVPSSSLGTKTYTCNVDHKPSNTKVDKRVESKYGPPCPPCPAPEFEGGPSVFLFPPKPKDTLMISRTPEVTCVVVDVSQEDPEVQFNWYVDGVEVHNAKTKPREEQFNSTYRVVSVLTVLHQDWLNGKEYKCKVSNKGLPSSIEKTISKAKGQPREPQVYTLPPSQEEMTKNQVSLTCLVKGFYPSDIAVEWESNGQPENNYKTTPPVLDSDGSFFLYSRLTVDKSRWQEGNVFSCSVMHEALHNHYTQKSLSLSLGKAS

SEQ ID NO: 84 - protein, 234 aa, Artificial Sequence
  Description of Artificial Sequence: Synthetic polypeptide
MRFQVQVLGLLLLWISGAQCDVQITQSPSYLAASPGETITINCRASKTISKYLAWYQEKPEKTDKLLIYSGSTLQSGIPSRFSGSGSGTDFTLTISGLEPEDFAMYYCQQHNEYPWTFGGGTKLEIKRTVAAPSVFIFPPSDEQLKSGTASVVCLLNNFYPREAKVQWKVDNALQSGNSQESVTEQDSKDSTYSLSSTLTLSKADYEKHKVYACEVTHQGLSSPVTKSFNRGEC

SEQ ID NO: 85 - protein, 462 aa, Artificial Sequence
  Description of Artificial Sequence: Synthetic polypeptide
MGWSWIFLFLLSGTAGVLSEVQLQQSGPELVKPGASVKISCKASGYSFTGYYMHWVKQSHVKSLEWIGRINPYNGATSYNQNFKDKASLTVDKSSSTAYMELHSLTSEDSAVYYCAREDYVYWGQGTTLTVSSAKTKGPSVFPLAPCSRSTSESTAALGCLVKDYFPEPVTVSWNSGALTSGVHTFPAVLQSSGLYSLSSVVTVPSSSLGTKTYTCNVDHKPSNTKVDKRVESKYGPPCPPCPAPEFEGGPSVFLFPPKPKDTLMISRTPEVTCVVVDVSQEDPEVQFNWYVDGVEVHNAKTKPREEQFNSTYRVVSVLTVLHQDWLNGKEYKCKVSNKGLPSSIEKTISKAKGQPREPQVYTLPPSQEEMTKNQVSLTCLVKGFYPSDIAVEWESNGQPENNYKTTPPVLDSDGSFFLYSRLTVDKSRWQEGNVFSCSVMHEALHNHYTQKSLSLSLGKAS

SEQ ID NO: 86 - protein, 238 aa, Artificial Sequence
  Description of Artificial Sequence: Synthetic polypeptide
MKLPVRLLVLMFWIPASSSDVVMTQTPLSLPVSLGDQASISCRSSQSLVHSNGNTYLHWYLQKPGQSPKLLIYKVSNRFSGVPDRFSGSGSGTDFALKISRVEAEDLGVYFCSQSTHVPWTFGGGTKLEIKRTVAAPSVFIFPPSDEQLKSGTASVVCLLNNFYPREAKVQWKVDNALQSGNSQESVTEQDSKDSTYSLSSTLTLSKADYEKHKVYACEVTHQGLSSPVTKSFNRGEC

SEQ ID NO: 87 - protein, 469 aa, Artificial Sequence
  Description of Artificial Sequence: Synthetic polypeptide
MEWSWIFLFLLSGTAGVHSEVQLQQSGPELVKPGASVKMSCKASGYTFTDYVLHWVKQKPGQGLEWIGYINPYNDGTKYNEKFKGKATLTSDKSSSTAYMELSSLTSEDSAVYYCARGYPAYSGYAMDYWGQGTSVTVSSAKTKGPSVFPLAPCSRSTSESTAALGCLVKDYFPEPVTVSWNSGALTSGVHTFPAVLQSSGLYSLSSVVTVPSSSLGTKTYTCNVDHKPSNTKVDKRVESKYGPPCPPCPAPEFEGGPSVFLFPPKPKDTLMISRTPEVTCVVVDVSQEDPEVQFNWYVDGVEVHNAKTKPREEQFNSTYRVVSVLTVLHQDWLNGKEYKCKVSNKGLPSSIEKTISKAKGQPREPQVYTLPPSQEEMTKNQVSLTCLVKGFYPSDIAVEWESNGQPENNYKTTPPVLDSDGSFFLYSRLTVDKSRWQEGNVFSCSVMHEALHNHYTQKSLSLSLGKAS

SEQ ID NO: 88 - protein, 234 aa, Artificial Sequence
  Description of Artificial Sequence: Synthetic polypeptide
MMSSAQFLGLLLLCFQGTRCDIQMTQTTSSLSASLGDRVTISCRASQDISNYLNWYQQKPDGTVKLLIYYTSRLHSGVPSRFSGSGSGTDYSLTISNLEQEDIATYFCHHGNTLPWTFGGGTKLEIKRTVAAPSVFIFPPSDEQLKSGTASVVCLLNNFYPREAKVQWKVDNALQSGNSQESVTEQDSKDSTYSLSSTLTLSKADYEKHKVYACEVTHQGLSSPVTKSFNRGEC

SEQ ID NO: 89 - protein, 467 aa, Artificial Sequence
  Description of Artificial Sequence: Synthetic polypeptide
MNLGLSLIFLVLVLKGVQCEVKLVESGGGLVQPGGSLKLSCATSGFTFSDYYMYWVRQTPEKRLEWVAYINSGGGSTYYPDTVKGRFTISRDNAKNTLYLQMSRLKSEDTAMYYCARRGLPFHAMDYWGQGTSVTVSSAKTKGPSVFPLAPCSRSTSESTAALGCLVKDYFPEPVTVSWNSGALTSGVHTFPAVLQSSGLYSLSSVVTVPSSSLGTKTYTCNVDHKPSNTKVDKRVESKYGPPCPPCPAPEFEGGPSVFLFPPKPKDTLMISRTPEVTCVVVDVSQEDPEVQFNWYVDGVEVHNAKTKPREEQFNSTYRVVSVLTVLHQDWLNGKEYKCKVSNKGLPSSIEKTISKAKGQPREPQVYTLPPSQEEMTKNQVSLTCLVKGFYPSDIAVEWESNGQPENNYKTTPPVLDSDGSFFLYSRLTVDKSRWQEGNVFSCSVMHEALHNHYTQKSLSLSLGKAS

SEQ ID NO: 90 - protein, 234 aa, Artificial Sequence
  Description of Artificial Sequence: Synthetic polypeptide
MMSSAQFLGLLLLCFQGTRCDIQMTQTTSSLSASLGDRVTISCSASQGISNYLNWYQQKPDGTVKLLIYYTSILHSGVPSRFSGSGSGTDYSLTIGNLEPEDIATYYCQQFNKLPPTFGGGTKLEIKRTVAAPSVFIFPPSDEQLKSGTASVVCLLNNFYPREAKVQWKVDNALQSGNSQESVTEQDSKDSTYSLSSTLTLSKADYEKHKVYACEVTHQGLSSPVTKSFNRGEC

SEQ ID NO: 91 - protein, 467 aa, Artificial Sequence
  Description of Artificial Sequence: Synthetic polypeptide
MDWLWNLLFLMAAAQSAQAQIQLVQSGPELKKPGETVKISCKASGYSFTNYGMNWVKQAPGKGLKWMGWINTYTGESTYADDFKGRFAFSLETSASTAYLQISNLKNEDMATYFCARGDFRYYYFDYWGQGTTLTGSSAKTKGPSVFPLAPCSRSTSESTAALGCLVKDYFPEPVTVSWNSGALTSGVHTFPAVLQSSGLYSLSSVVTVPSSSLGTKTYTCNVDHKPSNTKVDKRVESKYGPPCPPCPAPEFEGGPSVFLFPPKPKDTLMISRTPEVTCVVVDVSQEDPEVQFNWYVDGVEVHNAKTKPREEQFNSTYRVVSVLTVLHQDWLNGKEYKCKVSNKGLPSSIEKTISKAKGQPREPQVYTLPPSQEEMTKNQVSLTCLVKGFYPSDIAVEWESNGQPENNYKTTPPVLDSDGSFFLYSRLTVDKSRWQEGNVFSCSVMHEALHNHYTQKSLSLSLGKAS

SEQ ID NO: 92 - protein, 233 aa, Artificial Sequence
  Description of Artificial Sequence: Synthetic polypeptide
MSVLTQVLALLLLWLTGARCDIQMTQSPASLSASVGETVTITCRASGNIHNYLAWYQQKQGKSPQLLVYNAKTLADGVPSRFSGSGSGTQYSLKINTLQPEDFGSYYCQHFWDSWTFGGGTKLEIKRTVAAPSVFIFPPSDEQLKSGTASVVCLLNNFYPREAKVQWKVDNALQSGNSQESVTEQDSKDSTYSLSSTLTLSKADYEKHKVYACEVTHQGLSSPVTKSFNRGEC

SEQ ID NO: 93 - protein, 465 aa, Artificial Sequence
  Description of Artificial Sequence: Synthetic polypeptide
MEWTWVFLFLLSVTAGVHSQVQLQQSGAELMKPGASVKISCKATGYTFSSYWIEWVKQRPGHGLEWIGEILPGSGRTNDNEKFKGKATFTADTSSKKAYMQLSSLTSEDSAVYYCARRGGYSFAYWGQGTLVTVSAAKTKGPSVFPLAPCSRSTSESTAALGCLVKDYFPEPVTVSWNSGALTSGVHTFPAVLQSSGLYSLSSVVTVPSSSLGTKTYTCNVDHKPSNTKVDKRVESKYGPPCPPCPAPEFEGGPSVFLFPPKPKDTLMISRTPEVTCVVVDVSQEDPEVQFNWYVDGVEVHNAKTKPREEQFNSTYRVVSVLTVLHQDWLNGKEYKCKVSNKGLPSSIEKTISKAKGQPREPQVYTLPPSQEEMTKNQVSLTCLVKGFYPSDIAVEWESNGQPENNYKTTPPVLDSDGSFFLYSRLTVDKSRWQEGNVFSCSVMHEALHNHYTQKSLSLSLGKAS

SEQ ID NO: 94 - protein, 236 aa, Artificial Sequence
  Description of Artificial Sequence: Synthetic polypeptide
MTMFSLALLLSLLLLCVSDSRAETTVTQSPASLSMAIGEKVTIRCVTSTDIDDDVNWYQQKPGEPPKLLISEGNTLRPGVPSRFSSSGYGTDFVFTIENMLSEDVADYYCLQSGNLPYTFGGGTKLEIKRTVAAPSVFIFPPSDEQLKSGTASVVCLLNNFYPREAKVQWKVDNALQSGNSQESVTEQDSKDSTYSLSSTLTLSKADYEKHKVYACEVTHQGLSSPVTKSFNRGEC

SEQ ID NO: 95 - protein, 467 aa, Artificial Sequence
  Description of Artificial Sequence: Synthetic polypeptide
MAWVWTLLFLMAAAQSAQAQIQLVQSGPELKKPGETVKISCKASGYTFTNYGMNWVKQAPGKGLKWVGWINTFTGEPTYVDDFKGRFAFSLETSASTAYLQINNLKNEDTATYFCARGNFRYYYFDYWGQGTTLTVSSAKTKGPSVFPLAPCSRSTSESTAALGCLVKDYFPEPVTVSWNSGALTSGVHTFPAVLQSSGLYSLSSVVTVPSSSLGTKTYTCNVDHKPSNTKVDKRVESKYGPPCPPCPAPEFEGGPSVFLFPPKPKDTLMISRTPEVTCVVVDVSQEDPEVQFNWYVDGVEVHNAKTKPREEQFNSTYRVVSVLTVLHQDWLNGKEYKCKVSNKGLPSSIEKTISKAKGQPREPQVYTLPPSQEEMTKNQVSLTCLVKGFYPSDIAVEWESNGQPENNYKTTPPVLDSDGSFFLYSRLTVDKSRWQEGNVFSCSVMHEALHNHYTQKSLSLSLGKAS

SEQ ID NO: 96 - protein, 234 aa, Artificial Sequence
  Description of Artificial Sequence: Synthetic polypeptide
MSVLTQVLALLLLWLTGARCDIQMTQSPASLSASVGETVTITCRTSGNIRNYLAWYQQKQGKSPQLLVYNAKTLADGVPSRFGGSGSGTQYSLKINSLQPEDFGNYYCQHFWSSPYTFGGGTKLEIKRTVAAPSVFIFPPSDEQLKSGTASVVCLLNNFYPREAKVQWKVDNALQSGNSQESVTEQDSKDSTYSLSSTLTLSKADYEKHKVYACEVTHQGLSSPVTKSFNRGEC

SEQ ID NO: 97 - protein, 469 aa, Artificial Sequence
  Description of Artificial Sequence: Synthetic polypeptide
MMGWSYIILFLVATATDVHSQVQLQQPGAELVKPGASVKLSCKASGYTFTSYWMHWVKQRPGEGLEWIGEINPSYGRTDYNEKFKNKATLTVAKSSSTAYMQLSSLTSEDSAVYYCARGDYYGSSSFAYWGQGTLVTVSAAKTKGPSVFPLAPCSRSTSESTAALGCLVKDYFPEPVTVSWNSGALTSGVHTFPAVLQSSGLYSLSSVVTVPSSSLGTKTYTCNVDHKPSNTKVDKRVESKYGPPCPPCPAPEFEGGPSVFLFPPKPKDTLMISRTPEVTCVVVDVSQEDPEVQFNWYVDGVEVHNAKTKPREEQFNSTYRVVSVLTVLHQDWLNGKEYKCKVSNKGLPSSIEKTISKAKGQPREPQVYTLPPSQEEMTKNQVSLTCLVKGFYPSDIAVEWESNGQPENNYKTTPPVLDSDGSFFLYSRLTVDKSRWQEGNVFSCSVMHEALHNHYTQKSLSLSLGKAS

SEQ ID NO: 98 - protein, 235 aa, Artificial Sequence
  Description of Artificial Sequence: Synthetic polypeptide
MDFQVQIFSFLLMSASVIMSRGQIVLTQSPALMSASPGEKVTMTCSASSNISYMYWYQQKPRSSPKPWIYLTSNLASGVPARFSGSGSGTSYSLTTSSMEAEDAATYCCQQWSSNPPTFGAGTKLEIKRTVAAPSVFIFPPSDEQLKSGTASVVCLLNNFYPREAKVQWKVDNALQSGNSQESVTEQDSKDSTYSLSSTLTLSKADYEKHKVYACEVTHQGLSSPVTKSFNRGEC

SEQ ID NO: 99 - protein, 235 aa, Artificial Sequence
  Description of Artificial Sequence: Synthetic polypeptide
MDFRVQIFSFLLMSASVIMSRGQIVLTQSPALMSASPGEKVTMTCSASSNISYMYWYQQKPRSSPKPWIYLTSNLASGVPARFSGSGSGTSYSLTISSMEAEDAATYYCQQWSSNPPTFGAGTKLEIKRTVAAPSVFIFPPSDEQLKSGTASVVCLLNNFYPREAKVQWKVDNALQSGNSQESVTEQDSKDSTYSLSSTLTLSKADYEKHKVYACEVTHQGLSSPVTKSFNRGEC

SEQ ID NO: 100 - protein, 238 aa, Artificial Sequence
  Description of Artificial Sequence: Synthetic polypeptide
METDTLLLWVLLLWVPGSTGDIVLIQSPASLAVSLGQRATISCRASESVDSYVNSFMHWYQQKPGQPPKLLIYRVSNLESGIPARFSGSGSRTDFTLTINPVEADDVATYYCQQSNEDPFTFGSGTKLEIKRTVAAPSVFIFPPSDEQLKSGTASVVCLLNNFYPREAKVQWKVDNALQSGNSQESVTEQDSKDSTYSLSSTLTLSKADYEKHKVYACEVTHQGLSSPVTKSFNRGEC

SEQ ID NO: 101 - protein, 465 aa, Artificial Sequence
  Description of Artificial Sequence: Synthetic polypeptide
MECNWILPFILSVISGVYSEVQLQQSGTVLARPGASVNMSCKAAGYSFTSYWVYWVKQRPGQGLEWIGAIYPKNSRTSYNQKFQDKATLTAVTSASTAYMELSSLTNEDSAVYYCTRPHYDSFGYWGQGTLVTVSAAKTKGPSVFPLAPCSRSTSESTAALGCLVKDYFPEPVTVSWNSGALTSGVHTFPAVLQSSGLYSLSSVVTVPSSSLGTKTYTCNVDHKPSNTKVDKRVESKYGPPCPPCPAPEFEGGPSVFLFPPKPKDTLMISRTPEVTCVVVDVSQEDPEVQFNWYVDGVEVHNAKTKPREEQFNSTYRVVSVLTVLHQDWLNGKEYKCKVSNKGLPSSIEKTISKAKGQPREPQVYTLPPSQEEMTKNQVSLTCLVKGFYPSDIAVEWESNGQPENNYKTTPPVLDSDGSFFLYSRLTVDKSRWQEGNVFSCSVMHEALHNHYTQKSLSLSLGKAS

SEQ ID NO: 102 - protein, 238 aa, Artificial Sequence
  Description of Artificial Sequence: Synthetic polypeptide
METDTLLLWVLLLWVPGSTGDIVLTQSPASLAVSLGQRATISCRASESVDSYGISFMHWYQQKPGQPPKLLIYRASNQESGIPARFSGSGSRTDFTLTINPVEADDVATYYCQQSNEDPLTFGAGTKLEIKRTVAAPSVFIFPPSDEQLKSGTASVVCLLNNFYPREAKVQWKVDNALQSGNSQESVTEQDSKDSTYSLSSTLTLSKADYEKHKVYACEVTHQGLSSPVTKSFNRGEC

SEQ ID NO: 103 - protein, 473 aa, Artificial Sequence
  Description of Artificial Sequence: Synthetic polypeptide
NRLTSSLLLLIVPAYVLSQQVTLKESGPGILQPSQTLSLTCSFSGFSLSTSGMGVSWIRQPSGKGLEWLAHIYWDDDKRYNPSLKSRLTIFKDPSSNQVFLRITSVDTADTATYYCARNSHYYGSTYGGYFDVWGAGTTVTVSSAKTKGPSVFPLAPCSRSTSESTAALGCLVKDYFPEPVTVSWNSGALTSGVHTFPAVLQSSGLYSLSSVVTVPSSSLGTKTYTCNVDHKPSNTKVDKRVESKYGPPCPPCPAPEFEGGPSVFLFPPKPKDTLMISRTPEVTCVVVDVSQEDPEVQFNWYVDGVEVHNAKTKPREEQFNSTYRVVSVLTVLHQDWLNGKEYKCKVSNKGLPSSIEKTISKAKGQPREPQVYTLPPSQEEMTKNQVSLTCLVKGFYPSDIAVEWESNGQPENNYKTTPPVLDSDGSFFLYSRLTVDKSRWQEGNVFSCSVMHEALHNHYTQKSLSLSLGKAS

SEQ ID NO: 104 - protein, 238 aa, Artificial Sequence
  Description of Artificial Sequence: Synthetic polypeptide
METDTLLLWVLLLGVPGSTGNIVLTQSPTSFTVSLGQRATISCRASESVHSYGNSFMHWYQQKPGQPPKLLIYLASNVESGVPARFSGSGSRTDFTLTIDPVEADDAATYYCQQNSEDPWTFGGGTKLEIKRTVAAPSVFIFPPSDEQLKSGTASVVCLLNNFYPREAKVQWKVDNALQSGNSQESVTEQDSKDSTYSLSSTLTLSKADYEKHKVYACEVTHQGLSSPVTKSFNRGEC

SEQ ID NO: 105 - protein, 465 aa, Artificial Sequence
  Description of Artificial Sequence: Synthetic polypeptide
MEWTWVFLFLLSVTAGVHSQVQLQQSGTELMKPGASVKISCKATGYTFSTYWIEWVKQRPGHGLEWIGEILPGSGRTNDNEKFKGKATITADTSSKKAYMQLSSLTSEDSAVYYCARRGGYSFAFWGQGTLVSVSAAKTKGPSVFPLAPCSRSTSESTAALGCLVKDYFPEPVTVSWNSGALTSGVHTFPAVLQSSGLYSLSSVVTVPSSSLGTKTYTCNVDHKPSNTKVDKRVESKYGPPCPPCPAPEFEGGPSVFLFPPKPKDTLMISRTPEVTCVVVDVSQEDPEVQFNWYVDGVEVHNAKTKPREEQFNSTYRVVSVLTVLHQDWLNGKEYKCKVSNKGLPSSIEKTISKAKGQPREPQVYTLPPSQEEMTKNQVSLTCLVKGFYPSDIAVEWESNGQPENNYKTTPPVLDSDGSFFLYSRLTVDKSRWQEGNVFSCSVMHEALHNHYTQKSLSLSLGKAS

SEQ ID NO: 106 - protein, 236 aa, Artificial Sequence
  Description of Artificial Sequence: Synthetic polypeptide
MTMFSLALLLSLLLLCVSDSRAETTVTQSPASLSMAIGEKVTIRCVTSTDIDDDVNWYQQKPGEPPKLLISEGNTLRAGVPSRFSSSGYGTDFVFTIENMLSEDVADYYCLQSGNLPYTFGGGTKLEIKRTVAAPSVFIFPPSDEQLKSGTASVVCLLNNFYPREAKVQWKVDNALQSGNSQESVTEQDSKDSTYSLSSTLTLSKADYEKHKVYACEVTHQGLSSPVTKSFNRGEC

SEQ ID NO: 107 - protein, 473 aa, Artificial Sequence
  Description of Artificial Sequence: Synthetic polypeptide
MNRLTSSLLLLIVPAYVLSQVTLKESGPGILQPSQTLSLTCSFSGFSLSTSGMGLSWIRQPSGKGLEWLAHIYWDDDKRYNPSLKSRLTISKDTSSNQVFLKITIVDTADAATYYCARSSHYYGYGYGGYFDVWGAGTTVTVSSAKTKGPSVFPLAPCSRSTSESTAALGCLVKDYFPEPVTVSWNSGALTSGVHTFPAVLQSSGLYSLSSVVTVPSSSLGTKTYTCNVDHKPSNTKVDKRVESKYGPPCPPCPAPEFEGGPSVFLFPPKPKDTLMISRTPEVTCVVVDVSQEDPEVQFNWYVDGVEVHNAKTKPREEQFNSTYRVVSVLTVLHQDWLNGKEYKCKVSNKGLPSSIEKTISKAKGQPREPQVYTLPPSQEEMTKNQVSLTCLVKGFYPSDIAVEWESNGQPENNYKTTPPVLDSDGSFFLYSRLTVDKSRWQEGNVFSCSVMHEALHNHYTQKSLSLSLGKAS

SEQ ID NO: 108 - protein, 238 aa, Artificial Sequence
  Description of Artificial Sequence: Synthetic polypeptide
METDTLLLWVLLLWVPGSTGNIVLTQSPASLAVSLGQRATISCRASESIHSYGNSFLHWYQQKPGQPPKLLIYLASNLESGVPARFSGSGSRTDFTLTIDPVEADDAATYYCQQNNEDPWTFGGGTKLEIKRTVAAPSVFIFPPSDEQLKSGTASVVCLLNNFYPREAKVQWKVDNALQSGNSQESVTEQDSKDSTYSLSSTLTLSKADYEKHKVYACEVTHQGLSSPVTKSFNRGEC

SEQ ID NO: 109 - protein, 467 aa, Artificial Sequence
  Description of Artificial Sequence: Synthetic polypeptide
  MOD_RES (309)..(309): Any amino acid
MKCSWVIFFLMAVVTGVNSEVQLQQSGAELVRPGALVKLSCKASGFNINDYYIHWVKQRPEQGLERIGWIDPDNGNTIYDPKFQGKASITADTSPNTAYLQLSSLTSEDTAVYYCARTRSPMVTTGFVYWGQGTVVTVSAAKTKGPSVFPLAPCSRSTSESTAALGCLVKDYFPEPVTVSWNSGALTSGVHTFPAVLQSSGLYSLSSVVTVPSSSLGTKTYTCNVDHKPSNTKVDKRVESKYGPPCPPCPAPEFEGGPSVFLFPPKPKDTLMISRTPEVTCVVVDVSQEDPEVQFNWYVDGVEVHNAKXKPREEQFNSTYRVVSVLTVLHQDWLNGKEYKCKVSNKGLPSSIEKTISKAKGQPREPQVYTLPPSQEEMTKNQVSLTCLVKGFYPSDIAVEWESNGQPENNYKTTPPVLDSDGSFFLYSRLTVDKSRWQEGNVFSCSVMHEALHNHYTQKSLSLSLGK

SEQ ID NO: 110 - protein, 474 aa, Artificial Sequence
  Description of Artificial Sequence: Synthetic polypeptide
MERHWIFLFLFSVTAGVHSQVQLQQSGAELAKPGASVKMSCKASGYTFTTYWMHWVKQRPGQGLEWIGYINPITGYTEYNQKFKDKATLTADKSSSTAYMQLSSLTSEDSAVYYCAREGLSAMDYWGQGTSVTVTSAKTTAPSVYPLAPVCGDTTGSSVTLGCLVKGYFPEPVTLTWNSGSLSSGVHTFPAVLQSDLYTLSSSVTVTSSTWPSQTVTCSVAHPASSTTVDKKLEPSGPISTINPCPPCKECHKCPAPNLEGGPSVFIFPPNIKDVLMISLTPKVTCVVVDVSEDDPDVQISWFVNNVEVHTAQTQTHREDYNSTIRVVSTLPIQHQDWMSGKEFKCKVNNKDLPSPIERTISKIKGLVRAPQVYILPPPAEQLSRKDVSLTCLVVGFNPGDISVEWTSNGHTEENYKDTAPVLDSDGSYFIYSKLNMKTSKWEKTDSFSCNVRHEGLKNYYLKKTISRSPGKAS

SEQ ID NO: 111 - protein, 234 aa, Artificial Sequence
  Description of Artificial Sequence: Synthetic polypeptide
MESRIQAFVFVFLWLSGVGGDIVMTQSHKFMSTSVGDRVSVTCKASQDVTSAVAWYQQKPGQSPKLLIYWASTRHTGVPDRFTGSGSGTDYTLTISSGQAEDLALYYCHQYYSAPRTFGGGTKLEVKRADAAPTVSIFPPSSEQLTSGGASVVCFLNNFYPKDINVKWKIDGSERQNGVLNSWTDQDSKDSTYSMSSTLTLTKDEYERHNSYTCEATHKTSTSPIVKSFNRNEC

SEQ ID NO: 112 - protein, 465 aa, Artificial Sequence
  Description of Artificial Sequence: Synthetic polypeptide
MERHWIFLFLFSVTAGVHSQVQLQQSGAELAKPGASVKMSCKASGYTFTTYWMHWVKQRPGQGLEWIGYINPITGYTEYNQKFKDKATLTADKSSSTAYMQLSSLTSEDSAVYYCAREGLSAMDYWGQGTSVTVTSAKTTGPSVFPLAPCSRSTSESTAALGCLVKDYFPEPVTVSWNSGALTSGVHTFPAVLQSSGLYSLSSVVTVPSSSLGTKTYTCNVDHKPSNTKVDKRVESKYGPPCPPCPAPEFEGGPSVFLFPPKPKDTLMISRTPEVTCVVVDVSQEDPEVQFNWYVDGVEVHNAKTKPREEQFNSTYRVVSVLTVLHQDWLNGKEYKCKVSNKGLPSSIEKTISKAKGQPREPQVYTLPPSQEEMTKNQVSLTCLVKGFYPSDIAVEWESNGQPENNYKTTPPVLDSDGSFFLYSRLTVDKSRWQEGNVFSCSVMHEALHNHYTQKSLSLSLGKAS

SEQ ID NO: 113 - protein, 234 aa, Artificial Sequence
  Description of Artificial Sequence: Synthetic polypeptide
MESQIQAFVFVFLWLSGVGGDIVMTQSHKFMSTSVGDRVSVTCKASQDVTSAVAWYQQKPGQSPKLLIYWASTRHTGVPDRFTGSGSGTDYTLTISSGQAEDLALYYCHQYYSAPRTFGGGTKLEIKRTVAAPSVFIFPPSDEQLKSGTASVVCLLNNFYPREAKVQWKVDNALQSGNSQESVTEQDSKDSTYSLSSTLTLSKADYEKHKVYACEVTHQGLSSPVTKSFNRGEC

SEQ ID NO: 114 - protein, 466 aa, Artificial Sequence
  Description of Artificial Sequence: Synthetic polypeptide
MAVLALLLCLVAFPTCTLSQVQLKESGPGLVAPSQSLSITCSVSGFSLSNYDISWIRQPPGKGLEWLGVMWTGGGANYNSAFMSRLSINKDNSKSQVFLKMNNLQTDDTAIYYCVRDAVRYWNFDVWGAGTTVTVSSAKTKGPSVFPLAPCSRSTSESTAALGCLVKDYFPEPVTVSWNSGALTSGVHTFPAVLQSSGLYSLSSVVTVPSSSLGTKTYTCNVDHKPSNTKVDKRVESKYGPPCPPCPAPEFEGGPSVFLFPPKPKDTLMISRTPEVTCVVVDVSQEDPEVQFNWYVDGVEVHNAKTKPREEQFNSTYRVVSVLTVLHQDWLNGKEYKCKVSNKGLPSSIEKTISKAKGQPREPQVYTLPPSQEEMTKNQVSLTCLVKGFYPSDIAVEWESNGQPENNYKTTPPVLDSDGSFFLYSRLTVDKSRWQEGNVFSCSVMHEALHNHYTQKSLSLSLGKAS

SEQ ID NO: 115 - protein, 235 aa, Artificial Sequence
  Description of Artificial Sequence: Synthetic polypeptide
MDFQAQIFSFLLISASVIMSRGQIVLSQSPAILSASPGEKVTMTCRASSSVSYIHWYQQKPGSSPKPWIYATSHLASGVPARFSGSGSGTSYSLTISRVEAEDTATYYCQQWSSNPFTFGSGTKLEIKRTVAAPSVFIFPPSDEQLKSGTASVVCLLNNFYPREAKVQWKVDNALQSGNSQESVTEQDSKDSTYSLSSTLTLSKADYEKHKVYACEVTHQGLSSPVTKSFNRGEC

SEQ ID NO: 116 - protein, 469 aa, Artificial Sequence
  Description of Artificial Sequence: Synthetic polypeptide
MERHWIFLLLLSVTAGVHSQVQLQQSGAELARPGASVKMSCKASGYTFTTYTMHWVKQRPGQGLEWIGYINPSSGYTNYNQKFKDKATLTADKSSSTASMQLSSLTSEDSAVYYCARERAVLVPYAMDYWGQGTSVTVSSAKTKGPSVFPLAPCSRSTSESTAALGCLVKDYFPEPVTVSWNSGALTSGVHTFPAVLQSSGLYSLSSVVTVPSSSLGTKTYTCNVDHKPSNTKVDKRVESKYGPPCPPCPAPEFEGGPSVFLFPPKPKDTLMISRTPEVTCVVVDVSQEDPEVQFNWYVDGVEVHNAKTKPREEQFNSTYRVVSVLTVLHQDWLNGKEYKCKVSNKGLPSSIEKTISKAKGQPREPQVYTLPPSQEEMTKNQVSLTCLVKGFYPSDIAVEWESNGQPENNYKTTPPVLDSDGSFFLYSRLTVDKSRWQEGNVFSCSVMHEALHNHYTQKSLSLSLGKAS

SEQ ID NO: 117 - protein, 235 aa, Artificial Sequence
  Description of Artificial Sequence: Synthetic polypeptide
MHFQVQIFSFLLISASVIMSRGQIVLTQSPAVMSASPGEKVTITCTASSSLSYMHWFQQKPGTSPKLWLYSTSILASGVPTRFSGSGSGTSYSLTISRMEAEDAATYYCQQRSSSPFTFGSGTKLEIKRTVAAPSVFIFPPSDEQLKSGTASVVCLLNNFYPREAKVQWKVDNALQSGNSQESVTEQDSKDSTYSLSSTLTLSKADYEKHKVYACEVTHQGLSSPVTKSFNRGEC

SEQ ID NO: 118 - protein, 467 aa, Artificial Sequence
  Description of Artificial Sequence: Synthetic polypeptide
MGWTWIFILILSVTTGVHSEVQLQQSGPELEKPGASVKISCKASGYSFTGYNMNWVKQSNGKSLEWIGNIDPYYGDTNYNQKFKGKATLTVDKSSSTAYMHLKSLTSEDSAVYYCARPYGSEAYFAYWGQGTLVTVSAAKTKGPSVFPLAPCSRSTSESTAALGCLVKDYFPEPVTVSWNSGALTSGVHTFPAVLQSSGLYSLSSVVTVPSSSLGTKTYTCNVDHKPSNTKVDKRVESKYGPPCPPCPAPEFEGGPSVFLFPPKPKDTLMISRTPEVTCVVVDVSQEDPEVQFNWYVDGVEVHNAKTKPREEQFNSTYRVVSVLTVLHQDWLNGKEYKCKVSNKGLPSSIEKTISKAKGQPREPQVYTLPPSQEEMTKNQVSLTCLVKGFYPSDIAVEWESNGQPENNYKTTPPVLDSDGSFFLYSRLTVDKSRWQEGNVFSCSVMHEALHNHYTQKSLSLSLGKAS

SEQ ID NO: 119 - protein, 214 aa, Artificial Sequence
  Description of Artificial Sequence: Synthetic polypeptide
DIVMTQSPATLSVTPGDRVSLSCRASQSISDYLHWYQQKSHESPRLLIKYAAQSISGIPSRFSGSGSGSDFTLSINGVEPEDVGVYYCQNGHSFPYTFGGGTKLEIKRTVAAPSVFIFPPSDEQLKSGTASVVCLLNNFYPREAKVQWKVDNALQSGNSQESVTEQDSKDSTYSLSSTLTLSKADYEKHKVYACEVTHQGLSSPVTKSFNRGEC

SEQ ID NO: 120 - protein, 446 aa, Artificial Sequence
  Description of Artificial Sequence: Synthetic polypeptide
QVQLRQSGPELVKPGASVKMSCKASGYTFTDYVISWVKQRTGQGLEWIGDIYPGSGYSFYNENFKGKATLTADKSSTTAYMQLSSLTSEDSAVYFCATYYNYPFAYWGQGTLVTVSAAKTTGPSVFPLAPCSRSTSESTAALGCLVKDYFPEPVTVSWNSGALTSGVHTFPAVLQSSGLYSLSSVVTVPSSSLGTKTYTCNVDHKPSNTKVDKRVESKYGPPCPPCPAPEFEGGPSVFLFPPKPKDTLMISRTPEVTCVVVDVSQEDPEVQFNWYVDGVEVHNAKTKPREEQFNSTYRVVSVLTVLHQDWLNGKEYKCKVSNKGLPSSIEKTISKAKGQPREPQVYTLPPSQEEMTKNQVSLTCLVKGFYPSDIAVEWESNGQPENNYKTTPPVLDSDGSFFLYSRLTVDKSRWQEGNVFSCSVMHEALHNHYTQKSLSLSLGKAS

SEQ ID NO: 121 - protein, 219 aa, Artificial Sequence
  Description of Artificial Sequence: Synthetic polypeptide
DVVMTQTPLSLPVRLGDQASISCRSSQSLVHSNGNTYLHWYLQKPGQSPKLLIYKVSNRFSGVPDRFSGSGSGTNFTLKISRVEAEDLGLYFCSQSTHVPYTFGGGTKLEIKRTVAAPSVFIFPPSDEQLKSGTASVVCLLNNFYPREAKVQWKVDNALQSGNSQESVTEQDSKDSTYSLSSTLTLSKADYEKHKVYACEVTHQGLSSPVTKSFNRGEC

SEQ ID NO: 122 - protein, 469 aa, Artificial Sequence
  Description of Artificial Sequence: Synthetic polypeptide
MTLNMLLGLRWVFFVVFYQGVHCEVQLVESGGGLVQPKGSLKLSCAASGLTFNIYAMNWVRQAPGKGLEWVARIRNKSNNYATYYADSVKDRFTISRDDSQSLLYLQMNNLKTEDTAMYYCVGRDWFDYWGQGTLVTVSAAKTKGPSVFPLAPCSRSTSESTAALGCLVKDYFPEPVTVSWNSGALTSGVHTFPAVLQSSGLYSLSSVVTVPSSSLGTKTYTCNVDHKPSNTKVDKRVESKYGPPCPPCPAPEFEGGPSVFLFPPKPKDTLMISRTPEVTCVVVDVSQEDPEVQFNWYVDGVEVHNAKTKPREEQFNSTYRVVSVLTVLHQDWLNGKEYKCKVSNKGLPSSIEKTISKAKGQPREPQVYTLPPSQEEMTKNQVSLTCLVKGFYPSDIAVEWESNGQPENNYKTTPPVLDSDGSFFLYSRLTVDKSRWQEGNVFSCSVMHEALHNHYTQKSLSLSLGKAS

SEQ ID NO: 123 - protein, 235 aa, Artificial Sequence
  Description of Artificial Sequence: Synthetic polypeptide
MAWISLILSLLALSSGAISQAVVTQESALTTSPGETVTLTCRSSTGAVTTSNYANWVQEKPDHLFTGLIGGTNNRVSGVPARFSGSLIGDKAALTITGAQTEDEAIYFCALWYSNHWVFGGGTKLEIKRTVAAPSVFIFPPSDEQLKSGTASVVCLLNNFYPREAKVQWKVDNALQSGNSQESVTEQDSKDSTYSLSSTLTLSKADYEKHKVYACEVTHQGLSSPVTKSFNRGEC

SEQ ID NO: 124 - protein, 461 aa, Artificial Sequence
  Description of Artificial Sequence: Synthetic polypeptide
MEWTWVFLFLLSVTAGVHSQVQLQQSGAELMKPGASVKISCKATGYTFGSYWIEWVKQRPGHGLEWIGEILPGSGNTNYNENFKGKATFTADTSSNTAYMQLTSLTSEDSAVYYCARAGIYWGQGTLVTVSAAKTKGPSVFPLAPCSRSTSESTAALGCLVKDYFPEPVTVSWNSGALTSGVHTFPAVLQSSGLYSLSSVVTVPSSSLGTKTYTCNVDHKPSNTKVDKRVESKYGPPCPPCPAPEFEGGPSVFLFPPKPKDTLMISRTPEVTCVVVDVSQEDPEVQFNWYVDGVEVHNAKTKPREEQFNSTYRVVSVLTVLHQDWLNGKEYKCKVSNKGLPSSIEKTISKAKGQPREPQVYTLPPSQEEMTKNQVSLTCLVKGFYPSDIAVEWESNGQPENNYKTTPPVLDSDGSFFLYSRLTVDKSRWQEGNVFSCSVMHEALHNHYTQKSLSLSLGKAS

SEQ ID NO: 125 - protein, 238 aa, Artificial Sequence
  Description of Artificial Sequence: Synthetic polypeptide
MEKDTLLLWVLLLWVPGSTGDIVLTQSPAFLAVSLGQRATISCRASESVDNYGISFMNWFQQKPGQPPKLLIYVASKQGSGVPARFSGSGSGTDFSLNIHPMEEDDTAMYFCQQSKEVPRTFGGGTKLEIKRTVAAPSVFIFPPSDEQLKSGTASVVCLLNNFYPREAKVQWKVDNALQSGNSQESVTEQDSKDSTYSLSSTLTLSKADYEKHKVYACEVTHQGLSSPVTKSFNRGEC

SEQ ID NO: 126 - protein, 463 aa, Artificial Sequence
  Description of Artificial Sequence: Synthetic polypeptide
MECNWILPFILSVTSGVYSEVQLQQSGTVLARPGASVKMSCKASGYTFTSYWMHWVKQRPGQGLEWIGAIYPGNSDTTYNQKFKGKAKLTAVTSTSTAYMELSSLTNEDSAVYYCTPTYYFDYWGQGTSLTVSSAKTKGPSVFPLAPCSRSTSESTAALGCLVKDYFPEPVTVSWNSGALTSGVHTFPAVLQSSGLYSLSSVVTVPSSSLGTKTYTCNVDHKPSNTKVDKRVESKYGPPCPPCPAPEFEGGPSVFLFPPKPKDTLMISRTPEVTCVVVDVSQEDPEVQFNWYVDGVEVHNAKTKPREEQFNSTYRVVSVLTVLHQDWLNGKEYKCKVSNKGLPSSIEKTISKAKGQPREPQVYTLPPSQEEMTKNQVSLTCLVKGFYPSDIAVEWESNGQPENNYKTTPPVLDSDGSFFLYSRLTVDKSRWQEGNVFSCSVMHEALHNHYTQKSLSLSLGKAS

SEQ ID NO: 127 - protein, 238 aa, Artificial Sequence
  Description of Artificial Sequence: Synthetic polypeptide
MSPAQFLFLLVLWIRETNGDVVMTQTPLTLSVTIGQPASISCKSSQSLLDSDGKTYLNWFLQRPGQSPKRLIYLVSKLDSGVPDRFTGSGSGTDFTLKISRVEAEDLGVYYCWQGTHFPWTFGGGTKLEIKRTVAAPSVFIFPPSDEQLKSGTASVVCLLNNFYPREAKVQWKVDNALQSGNSQESVTEQDSKDSTYSLSSTLTLSKADYEKHKVYACEVTHQGLSSPVTKSFNRGEC

SEQ ID NO: 128 - protein, 468 aa, Artificial Sequence
  Description of Artificial Sequence: Synthetic polypeptide
MGGIWIFLFLLSGTAGAHSEIQLQQTGPELVKPGASVKISCKASGYPFTDYIMVWVKQSHGKSLEWIGNISPYYGTTNYNLKFKGKATLTVDKSSSTAYMQLNSLTSEDSAVYYCARSPNWDGAWFAHWGQGALVTVSAAKTKGPSVFPLAPCSRSTSESTAALGCLVKDYFPEPVTVSWNSGALTSGVHTFPAVLQSSGLYSLSSVVTVPSSSLGTKTYTCNVDHKPSNTKVDKRVESKYGPPCPPCPAPEFEGGPSVFLFPPKPKDTLMISRTPEVTCVVVDVSQEDPEVQFNWYVDGVEVHNAKTKPREEQFNSTYRVVSVLTVLHQDWLNGKEYKCKVSNKGLPSSIEKTISKAKGQPREPQVYTLPPSQEEMTKNQVSLTCLVKGFYPSDIAVEWESNGQPENNYKTTPPVLDSDGSFFLYSRLTVDKSRWQEGNVFSCSVMHEALHNHYTQKSLSLSLGKAS

SEQ ID NO: 129 - protein, 238 aa, Artificial Sequence
  Description of Artificial Sequence: Synthetic polypeptide
METDTILLWVLLLWVPGSTGDIVLTQSPASLAVSLGQRATISCKASQSVDYDGDSYMNWFQQKPGQPPKLLIYAASNLESGIPARFSGSGSGTDFTLNIHPVEEEDAATYYCQQSNEDPFTFGSGTKLEIKRTVAAPSVFIFPPSDEQLKSGTASVVCLLNNFYPREAKVQWKVDNALQSGNSQESVTEQDSKDSTYSLSSTLTLSKADYEKHKVYACEVTHQGLSSPVTKSFNRGEC

SEQ ID NO: 130 - protein, 467 aa, Artificial Sequence
  Description of Artificial Sequence: Synthetic polypeptide
MAVLGLLLCLVTFPSCVLSQVQLKESGPGLVAPSQSLSITCTVSGFSLSRYSVFWVRQPPGKGLEWLGLIWGGGSTDYNSALKSRLSISKDNSKSQVFLKMNSLQTDDTAMYYCARIYFDYDGAMDYWGQGTSVTVSSAKTTGPSVFPLAPCSRSTSESTAALGCLVKDYFPEPVTVSWNSGALTSGVHTFPAVLQSSGLYSLSSVVTVPSSSLGTKTYTCNVDHKPSNTKVDKRVESKYGPPCPPCPAPEFEGGPSVFLFPPKPKDTLMISRTPEVTCVVVDVSQEDPEVQFNWYVDGVEVHNAKTKPREEQFNSTYRVVSVLTVLHQDWLNGKEYKCKVSNKGLPSSIEKTISKAKGQPREPQVYTLPPSQEEMTKNQVSLTCLVKGFYPSDIAVEWESNGQPENNYKTTPPVLDSDGSFFLYSRLTVDKSRWQEGNVFSCSVMHEALHNHYTQKSLSLSLGKAS

SEQ ID NO: 131 - protein, 243 aa, Artificial Sequence
  Description of Artificial Sequence: Synthetic polypeptide
MHRTSMGIKMESRIQAFVFVFLWLSGVGGDIVMTQSHKFMSTSVGDRVSVTCKASQDVTSAVAWYQQKPGQSPKLLIYWASTRHTGVPDRFTGSGSGTDYTLTISSGQAEDLALYYCHQYYSAPRTFGGGTKLEIKRTVAAPSVFIFPPSDEQLKSGTASVVCLLNNFYPREAKVQWKVDNALQSGNSQESVTEQDSKDSTYSLSSTLTLSKADYEKHKVYACEVTHQGLSSPVTKSFNRGEC

SEQ ID NO: 132 - protein, 467 aa, Artificial Sequence
  Description of Artificial Sequence: Synthetic polypeptide
MEWNWVVLFLLSLTAGVYAQGQMQQSGAELVKPGASVKLSCKTSGFTFSSNYISWLKQKPGQSLEWIAWIYAGTGGITYNQKFRGRAQLTVDTSSSTAYMQFSSLTTDDSAIYYCARHVRGYHPMDYWGQGTSVTVSSAKTKGPSVFPLAPCSRSTSESTAALGCLVKDYFPEPVTVSWNSGALTSGVHTFPAVLQSSGLYSLSSVVTVPSSSLGTKTYTCNVDHKPSNTKVDKRVESKYGPPCPPCPAPEFEGGPSVFLFPPKPKDTLMISRTPEVTCVVVDVSQEDPEVQFNWYVDGVEVHNAKTKPREEQFNSTYRVVSVLTVLHQDWLNGKEYKCKVSNKGLPSSIEKTISKAKGQPREPQVYTLPPSQEEMTKNQVSLTCLVKGFYPSDIAVEWESNGQPENNYKTTPPVLDSDGSFFLYSRLTVDKSRWQEGNVFSCSVMHEALHNHYTQKSLSLSLGKAS

SEQ ID NO: 133 - protein, 234 aa, Artificial Sequence
  Description of Artificial Sequence: Synthetic polypeptide
MESQTQVFVYMLLWLSGVDGDIVMTQSQKFMSASVGDRVSVTCRASQNVVTNVGWYQQKPGQSPKVLIYSASFRYSGVPDRFTGSGSGTDFTLTITNVQSEDLAEYFCQQYNNYPYTFGGGTKLEIKRTVAAPSVFIFPPSDEQLKSGTASVVCLLNNFYPREAKVQWKVDNALQSGNSQESVTEQDSKDSTYSLSSTLTLSKADYEKHKVYACEVTHQGLSSPVTKSFNRGEC

SEQ ID NO: 134 - protein, 468 aa, Artificial Sequence
  Description of Artificial Sequence: Synthetic polypeptide
MGWSYIILFLVATATDVHSQVQLQQPGAELVKPGASVKLSCKASGYTFTSYWMHWVKQRPGEGLEWIGEINPSYGRTDYNGKFKNKATLTVAKSSSTAYMQLSSLTSEDSAVYYCARGDYYGSSSFAYWGQGTLVTVSAAKTKGPSVFPLAPCSRSTSESTAALGCLVKDYFPEPVTVSWNSGALTSGVHTFPAVLQSSGLYSLSSVVTVPSSSLGTKTYTCNVDHKPSNTKVDKRVESKYGPPCPPCPAPEFEGGPSVFLFPPKPKDTLMISRTPEVTCVVVDVSQEDPEVQFNWYVDGVEVHNAKTKPREEQFNSTYRVVSVLTVLHQDWLNGKEYKCKVSNKGLPSSIEKTISKAKGQPREPQVYTLPPSQEEMTKNQVSLTCLVKGFYPSDIAVEWESNGQPENNYKTTPPVLDSDGSFFLYSRLTVDKSRWQEGNVFSCSVMHEALHNHYTQKSLSLSLGKAS

SEQ ID NO: 135 - protein, 234 aa, Artificial Sequence
  Description of Artificial Sequence: Synthetic polypeptide
MESQTQVFVYMLLWLSGVDGDIVMTQSQKFMSTSLGDRVSVTCKASQNVGTNVAWYQQKPGHSPKALIYSASYRYSGVPDRFTGSGSGTDFTLTISNVQSEDLAEFFCQQYNNYPYTFGGGTTLEIKRTVAAPSVFIFPPSDEQLKSGTASVVCLLNNFYPREAKVQWKVDNALQSGNSQESVTEQDSKDSTYSLSSTLTLSKADYEKHKVYACEVTHQGLSSPVTKSFNRGEC

SEQ ID NO: 136 - DNA, 3463 bp, Artificial Sequence
  Description of Artificial Sequence: Synthetic polynucleotide
atgaacaggcttacttcctcattgctgctgctgattgtccctgcatatgtcctgtcccaggttactctgaaagagtctggccctgggatattgcagccctcccagaccctcagtctgacttgttctttctctgggttttcactgagcacttctggtatgggtctgagctggattcgtcagccttcaggaaagggtctggagtggctggcacacatttactgggatgatgacaagcgctataacccatccctgaagagccggctcacaatctccaaggatacctccagcaaccaggttttcctcaagatcaccattgtggacactgcagatgctgccacatactactgtgctcgaagctcccattactacggttatggctacgggggatacttcgatgtctggggcgcagggaccacggtcaccgtctcctcagccaaaacgaagggcccatccgtcttccccctggcgccctgctccaggagcacctccgagagcacagccgccctgggctgcctggtcaaggactacttccccgaaccggtgacggtgtcgtggaactcaggcgccctgaccagcggcgtgcacaccttcccggctgtcctacagtcctcaggactctactccctcagcagcgtggtgaccgtgccctccagcagcttgggcacgaagacctacacctgcaacgtagatcacaagcccagcaacaccaaggtggacaagagagttgagtccaaatatggtcccccatgcccaccctgcccagcacctgagttcgaagggggaccatcagtcttcctgttccccccaaaacccaaggacactctcatgatctcccggacccctgaggtcacgtgcgtggtggtggacgtgagccaggaagaccccgaggtccagttcaactggtacgtggatggcgtggaggtgcataatgccaagacaaagccgcgggaggagcagttcaacagcacgtaccgtgtggtcagcgtcctcaccgtcctgcaccaggactggctgaacggcaaggagtacaagtgcaaggtctccaacaaaggcctcccgtcctccatcgagaaaaccatctccaaagccaaagggcagccccgagagccacaggtgtacaccctgcccccatcccaggaggagatgaccaagaaccaggtcagcctgacctgcctggtcaaaggcttctaccccagcgacatcgccgtggagtgggagagcaatgggcagccggagaacaactacaagaccacgcctcccgtgctggactccgacggctccttcttcctctacagcaggctaaccgtggacaagagcaggtggcaggaggggaatgtcttctcatgctccgtgatgcatgaggctctgcacaaccactacacacagaagagcctctccctgtctctgggtaaagctagtcagacccccaccaacaccatcagcgtgacccccaccaacaacagcacccccaccaacaacagcaaccccaagcccaaccccgctagctcccggccggggctgccggtcgagtacctgcaggtgccgtcgccgtcgatgggccgcgacatcaaggttcagttccagagcggtgggaacaactcacctgcggtttatctgctcgacggcctgcgcgcccaagacgactacaacggctgggatatcaacaccccggcgttcgagtggtactaccagtcgggactgtcgatagtcatgccggtcggcgggcagtccagcttctacagcgactggtacagcccggcctgcggtaaggctggctgccagacttacaagtgggaaaccttcctgaccagcgagctgccgcaatggttgtccgccaacagggccgtgaagcccaccggcagcgctgcaatcggcttgtcgatggccggctcgtcggcaatgatcttggccgcctaccacccccagcagttcatctacgccggctcgctgtcggccctgctggacccctctcaggggatggggcctagcctgatcggcctcgcgatgggtgacgccggcggttacaaggccgcagacatgtggggtccctcgagtgacccggcatgggagcgcaacgaccctacgcagcagatccccaagctggtcgcaaacaacacccggctatgggtttattgcgggaacggcaccccgaacgagttgggcggtgccaacatacccgccgagttcttggagaacttcgttcgtagcagcaacctgaagttccaggatgcgtacaacgccgcgggcgggcacaacgccgtgttcaacttcccgcccaacggcacgcacagctgggagtactggggcgctcagctcaacgccatgaagggtgacctgcagagttcgttaggcgccggcgaattccccaccagcacccccgccgacagcagcaccatcacccccaccgccacccccaccgccacccccaccatcaagggcactagcatgacagagcagcagtggaatttcgcgggtatcgaggccgcggcaagcgcaatccagggaaatgtcacgtccattcattccctccttgacgaggggaagcagtccctgaccaagctcgcagcggcctggggcggtagcggttcggaggcgtaccagggtgtccagcaaaaatgggacgccacggctaccgagctgaacaacgcgctgcagaacctggcgcggacgatcagcgaagccggtcaggcaatggcttcgaccgaaggcaacgtcactgggatgttcgcaaagcttggcggcgcgcctaccaacggcagcatcaccgtggccgccaccgcccccaccgtgacccccaccgtgaacgccacccccagcgccgcctctagcgccgcgcccaagacctactgcgaggagttgaaaggcaccgataccggccaggcgtgccagattcaaatgtccgacccggcctacaacatcaacatcagcctgcccagttactaccccgaccagaagtcgctggaaaattacatcgcccagacgcgcgacaagttcctcagcgcggccacatcgtccactccacgcgaagccccctacgaattgaatatcacctcggccacataccagtccgcgataccgccgcgtggtacgcaggccgtggtgctcaaggtctaccagaacgccggcggcacgcacccaacgaccacgtacaaggccttcgattgggaccaggcctatcgcaagccaatcacctatgacacgctgtggcaggctgacaccgatccgctgccagtcgtcttccccattgtgcaaggtgaactgagcaagcagaccggacaacaggtatcgatagcgccgaatgccggcttggacccggtgaattatcagaacttcgcagtcacgaacgacggggtgattttcttcttcaacccgggggagttgctgcccgaagcagccggcccaacccaggtattggtcccacgttccgcgatcgactcgatgctggccgaattctaggcggccg

SEQ ID NO: 137 - protein, 1132 aa, Artificial Sequence
  Description of Artificial Sequence: Synthetic polypeptide
QVTLKESGPGILQPSQTLSLTCSFSGFSLSTSGMGLSWIRQPSGKGLEWLAHIYWDDDKRYNPSLKSRLTISKDTSSNQVFLKITIVDTADAATYYCARSSHYYGYGYGGYFDVWGAGTTVTVSSAKTKGPSVFPLAPCSRSTSESTAALGCLVKDYFPEPVTVSWNSGALTSGVHTFPAVLQSSGLYSLSSVVTVPSSSLGTKTYTCNVDHKPSNTKVDKRVESKYGPPCPPCPAPEFEGGPSVFLFPPKPKDTLMISRTPEVTCVVVDVSQEDPEVQFNWYVDGVEVHNAKTKPREEQFNSTYRVVSVLTVLHQDWLNGKEYKCKVSNKGLPSSIEKTISKAKGQPREPQVYTLPPSQEEMTKNQVSLTCLVKGFYPSDIAVEWESNGQPENNYKTTPPVLDSDGSFFLYSRLTVDKSRWQEGNVFSCSVMHEALHNHYTQKSLSLSLGKASQTPTNTISVTPTNNSTPTNNSNPKPNPASSRPGLPVEYLQVPSPSMGRDIKVQFQSGGNNSPAVYLLDGLRAQDDYNGWDINTPAFEWYYQSGLSIVMPVGGQSSFYSDWYSPACGKAGCQTYKWETFLTSELPQWLSANRAVKPTGSAAIGLSMAGSSAMILAAYHPQQFIYAGSLSALLDPSQGMGPSLIGLAMGDAGGYKAADMWGPSSDPAWERNDPTQQIPKLVANNTRLWVYCGNGTPNELGGANIPAEFLENFVRSSNLKFQDAYNAAGGHNAVFNFPPNGTHSWEYWGAQLNAMKGDLQSSLGAGEFPTSTPADSSTITPTATPTATPTIKGTSMTEQQWNFAGIEAAASAIQGNVTSIHSLLDEGKQSLTKLAAAWGGSGSEAYQGVQQKWDATATELNNALQNLARTISEAGQAMASTEGNVTGMFAKLGGAPTNGSITVAATAPTVTPTVNATPSAASSAAPKTYCEELKGTDTGQACQIQMSDPAYNINISLPSYYPDQKSLENYIAQTRDKFLSAATSSTPREAPYELNITSATYQSAIPPRGTQAVVLKVYQNAGGTHPTTTYKAFDWDQAYRKPITYDTLWQADTDPLPVVFPIVQGELSKQTGQQVSIAPNAGLDPVNYQNFAVTNDGVIFFFNPGELLPEAAGPTQVLVPRSAIDSMLAEF

SEQ ID NO: 138 - DNA, 3460 bp, Artificial Sequence
  Description of Artificial Sequence: Synthetic polynucleotide
atgaacaggcttacttcctcattgctgctgctgattgtccctgcatatgtcctgtcccaggttactctgaaagagtctggccctgggatattgcagccctcccagaccctcagtctgacttgttctttctctgggttttcactgagcacttctggtatgggtctgagctggattcgtcagccttcaggaaagggtctggagtggctggcacacatttactgggatgatgacaagcgctataacccatccctgaagagccggctcacaatctccaaggatacctccagcaaccaggttttcctcaagatcaccattgtggacactgcagatgctgccacatactactgtgctcgaagctcccattactacggttatggctacgggggatacttcgatgtctggggcgcagggaccacggtcaccgtctcctcagccaaaacgaagggcccatccgtcttccccctggcgccctgctccaggagcacctccgagagcacagccgccctgggctgcctggtcaaggactacttccccgaaccggtgacggtgtcgtggaactcaggcgccctgaccagcggcgtgcacaccttcccggctgtcctacagtcctcaggactctactccctcagcagcgtggtgaccgtgccctccagcagcttgggcacgaagacctacacctgcaacgtagatcacaagcccagcaacaccaaggtggacaagagagttgagtccaaatatggtcccccatgcccaccctgcccagcacctgagttcgaagggggaccatcagtcttcctgttccccccaaaacccaaggacactctcatgatctcccggacccctgaggtcacgtgcgtggtggtggacgtgagccaggaagaccccgaggtccagttcaactggtacgtggatggcgtggaggtgcataatgccaagacaaagccgcgggaggagcagttcaacagcacgtaccgtgtggtcagcgtcctcaccgtcctgcaccaggactggctgaacggcaaggagtacaagtgcaaggtctccaacaaaggcctcccgtcctccatcgagaaaaccatctccaaagccaaagggcagccccgagagccacaggtgtacaccctgcccccatcccaggaggagatgaccaagaaccaggtcagcctgacctgcctggtcaaaggcttctaccccagcgacatcgccgtggagtgggagagcaatgggcagccggagaacaactacaagaccacgcctcccgtgctggactccgacggctccttcttcctctacagcaggctaaccgtggacaagagcaggtggcaggaggggaatgtcttctcatgctccgtgatgcatgaggctctgcacaaccactacacacagaagagcctctccctgtctctgggtaaagctagtcagacccccaccaacaccatcagcgtgacccccaccaacaacagcacccccaccaacaacagcaaccccaagcccaaccccgctagcgccgcgcccaagacctactgcgaggagttgaaaggcaccgataccggccaggcgtgccagattcaaatgtccgacccggcctacaacatcaacatcagcctgcccagttactaccccgaccagaagtcgctggaaaattacatcgcccagacgcgcgacaagttcctcagcgcggccacatcgtccactccacgcgaagccccctacgaattgaatatcacctcggccacataccagtccgcgataccgccgcgtggtacgcaggccgtggtgctcaaggtctaccagaacgccggcggcacgcacccaacgaccacgtacaaggccttcgattgggaccaggcctatcgcaagccaatcacctatgacacgctgtggcaggctgacaccgatccgctgccagtcgtcttccccattgtgcaaggtgaactgagcaagcagaccggacaacaggtatcgatagcgccgaatgccggcttggacccggtgaattatcagaacttcgcagtcacgaacgacggggtgattttcttcttcaacccgggggagttgctgcccgaagcagccggcccaacccaggtattggtcccacgttccgcgatcgactcgatgctggccaagcttggcggcgcgcctaccaacggcagcatcaccgtggccgccaccgcccccaccgtgacccccaccgtgaacgccacccccagcgccgcctctagcatgtcgcaaatcatgtacaactaccccgcgatgttgggtcacgccggggatatggccggatatgccggcacgctgcagagcttgggtgccgagatcgccgtggagcaggccgcgttgcagagtgcgtggcagggcgataccgggatcacgtatcaggcgtggcaggcacagtggaaccaggccatggaagatttggtgcgggcctatcatgcgatgtccagcacccatgaagccaacaccatggcgatgatggcccgcgacacggccgaagccgccaaatggggcggcgaattccccaccagcacccccgccgacagcagcaccatcacccccaccgccacccccaccgccacccccaccatcaagggcactagctcccggccggggctgccggtcgagtacctgcaggtgccgtcgccgtcgatgggccgcgacatcaaggttcagttccagagcggtgggaacaactcacctgcggtttatctgctcgacggcctgcgcgcccaagacgactacaacggctgggatatcaacaccccggcgttcgagtggtactaccagtcgggactgtcgatagtcatgccggtcggcgggcagtccagcttctacagcgactggtacagcccggcctgcggtaaggctggctgccagacttacaagtgggaaaccttcctgaccagcgagctgccgcaatggttgtccgccaacagggccgtgaagcccaccggcagcgctgcaatcggcttgtcgatggccggctcgtcggcaatgatcttggccgcctaccacccccagcagttcatctacgccggctcgctgtcggccctgctggacccctctcaggggatggggcctagcctgatcggcctcgcgatgggtgacgccggcggttacaaggccgcagacatgtggggtccctcgagtgacccggcatgggagcgcaacgaccctacgcagcagatccccaagctggtcgcaaacaacacccggctatgggtttattgcgggaacggcaccccgaacgagttgggcggtgccaacatacccgccgagttcttggagaacttcgttcgtagcagcaacctgaagttccaggatgcgtacaacgccgcgggcgggcacaacgccgtgttcaacttcccgcccaacggcacgcacagctgggagtactggggcgctcagctcaacgccatgaagggtgacctgcagagttcgttaggcgccggctgagcggccg

SEQ ID NO: 139 - protein, 1131 aa, Artificial Sequence
  Description of Artificial Sequence: Synthetic polypeptide
QVTLKESGPGILQPSQTLSLTCSFSGFSLSTSGMGLSWIRQPSGKGLEWLAHIYWDDDKRYNPSLKSRLTISKDTSSNQVFLKITIVDTADAATYYCARSSHYYGYGYGGYFDVWGAGTTVTVSSAKTKGPSVFPLAPCSRSTSESTAALGCLVKDYFPEPVTVSWNSGALTSGVHTFPAVLQSSGLYSLSSVVTVPSSSLGTKTYTCNVDHKPSNTKVDKRVESKYGPPCPPCPAPEFEGGPSVFLFPPKPKDTLMISRTPEVTCVVVDVSQEDPEVQFNWYVDGVEVHNAKTKPREEQFNSTYRVVSVLTVLHQDWLNGKEYKCKVSNKGLPSSIEKTISKAKGQPREPQVYTLPPSQEEMTKNQVSLTCLVKGFYPSDIAVEWESNGQPENNYKTTPPVLDSDGSFFLYSRLTVDKSRWQEGNVFSCSVMHEALHNHYTQKSLSLSLGKASQTPTNTISVTPTNNSTPTNNSNPKPNPASAAPKTYCEELKGTDTGQACQIQMSDPAYNINISLPSYYPDQKSLENYIAQTRDKFLSAATSSTPREAPYELNITSATYQSAIPPRGTQAVVLKVYQNAGGTHPTTTYKAFDWDQAYRKPITYDTLWQADTDPLPVVFPIVQGELSKQTGQQVSIAPNAGLDPVNYQNFAVTNDGVIFFFNPGELLPEAAGPTQVLVPRSAIDSMLAKLGGAPTNGSITVAATAPTVTPTVNATPSAASSMSQIMYNYPAMLGHAGDMAGYAGTLQSLGAEIAVEQAALQSAWQGDTGITYQAWQAQWNQAMEDLVRAYHAMSSTHEANTMAMMARDTAEAAKWGGEFPTSTPADSSTITPTATPTATPTIKGTSSRPGLPVEYLQVPSPSMGRDIKVQFQSGGNNSPAVYLLDGLRAQDDYNGWDINTPAFEWYYQSGLSIVMPVGGQSSFYSDWYSPACGKAGCQTYKWETFLTSELPQWLSANRAVKPTGSAAIGLSMAGSSAMILAAYHPQQFIYAGSLSALLDPSQGMGPSLIGLAMGDAGGYKAADMWGPSSDPAWERNDPTQQIPKLVANNTRLWVYCGNGTPNELGGANIPAEFLENFVRSSNLKFQDAYNAAGGHNAVFNFPPNGTHSWEYWGAQLNAMKGDLQSSLGAG

SEQ ID NO: 140 - DNA, 3471 bp, Artificial Sequence
  Description of Artificial Sequence: Synthetic polynucleotide
atggacctcctgtgcaagaacatgaagcacctgtggttcttcctcctgctggtggcggctcccagatgggtcctgtcccggctgcagctgcaggagtcgggcccaggcctgctgaagccttcggtgaccctgtccctcacctgcactgtctcgggtgactccgtcgccagtagttcttattactggggctgggtccgtcagcccccagggaagggactcgagtggatagggactatcaattttagtggcaatatgtattatagtccgtccctcaggagtcgagtgaccatgtcggcagacatgtccgagaactccttctatctgaaattggactctgtgaccgcagcagacacggccgtctattattgtgcggcaggacacctcgttatgggatttggggcccactggggacagggaaaactggtctccgtctctccagcttccaccaagggcccatccgtcttccccctggcgccctgctccaggagcacctccgagagcacagccgccctgggctgcctggtcaaggactacttccccgaaccggtgacggtgtcgtggaactcaggcgccctgaccagcggcgtgcacaccttcccggctgtcctacagtcctcaggactctactccctcagcagcgtggtgaccgtgccctccagcagcttgggcacgaagacctacacctgcaacgtagatcacaagcccagcaacaccaaggtggacaagagagttgagtccaaatatggtcccccatgcccaccctgcccagcacctgagttcgaagggggaccatcagtcttcctgttccccccaaaacccaaggacactctcatgatctcccggacccctgaggtcacgtgcgtggtggtggacgtgagccaggaagaccccgaggtccagttcaactggtacgtggatggcgtggaggtgcataatgccaagacaaagccgcgggaggagcagttcaacagcacgtaccgtgtggtcagcgtcctcaccgtcctgcaccaggactggctgaacggcaaggagtacaagtgcaaggtctccaacaaaggcctcccgtcctccatcgagaaaaccatctccaaagccaaagggcagccccgagagccacaggtgtacaccctgcccccatcccaggaggagatgaccaagaaccaggtcagcctgacctgcctggtcaaaggcttctaccccagcgacatcgccgtggagtgggagagcaatgggcagccggagaacaactacaagaccacgcctcccgtgctggactccgacggctccttcttcctctacagcaggctaaccgtggacaagagcaggtggcaggaggggaatgtcttctcatgctccgtgatgcatgaggctctgcacaaccactacacacagaagagcctctccctgtctctgggtaaagctagtcagacccccaccaacaccatcagcgtgacccccaccaacaacagcacccccaccaacaacagcaaccccaagcccaaccccgctagctcccggccggggctgccggtcgagtacctgcaggtgccgtcgccgtcgatgggccgcgacatcaaggttcagttccagagcggtgggaacaactcacctgcggtttatctgctcgacggcctgcgcgcccaagacgactacaacggctgggatatcaacaccccggcgttcgagtggtactaccagtcgggactgtcgatagtcatgccggtcggcgggcagtccagcttctacagcgactggtacagcccggcctgcggtaaggctggctgccagacttacaagtgggaaaccttcctgaccagcgagctgccgcaatggttgtccgccaacagggccgtgaagcccaccggcagcgctgcaatcggcttgtcgatggccggctcgtcggcaatgatcttggccgcctaccacccccagcagttcatctacgccggctcgctgtcggccctgctggacccctctcaggggatggggcctagcctgatcggcctcgcgatgggtgacgccggcggttacaaggccgcagacatgtggggtccctcgagtgacccggcatgggagcgcaacgaccctacgcagcagatccccaagctggtcgcaaacaacacccggctatgggtttattgcgggaacggcaccccgaacgagttgggcggtgccaacatacccgccgagttcttggagaacttcgttcgtagcagcaacctgaagttccaggatgcgtacaacgccgcgggcgggcacaacgccgtgttcaacttcccgcccaacggcacgcacagctgggagtactggggcgctcagctcaacgccatgaagggtgacctgcagagttcgttaggcgccggcgaattccccaccagcacccccgccgacagcagcaccatcacccccaccgccacccccaccgccacccccaccatcaagggcactagcatgacagagcagcagtggaatttcgcgggtatcgaggccgcggcaagcgcaatccagggaaatgtcacgtccattcattccctccttgacgaggggaagcagtccctgaccaagctcgcagcggcctggggcggtagcggttcggaggcgtaccagggtgtccagcaaaaatgggacgccacggctaccgagctgaacaacgcgctgcagaacctggcgcggacgatcagcgaagccggtcaggcaatggcttcgaccgaaggcaacgtcactgggatgttcgcaaagcttggcggcgcgcctaccaacggcagcatcaccgtggccgccaccgcccccaccgtgacccccaccgtgaacgccacccccagcgccgcctctagcgccgcgcccaagacctactgcgaggagttgaaaggcaccgataccggccaggcgtgccagattcaaatgtccgacccggcctacaacatcaacatcagcctgcccagttactaccccgaccagaagtcgctggaaaattacatcgcccagacgcgcgacaagttcctcagcgcggccacatcgtccactccacgcgaagccccctacgaattgaatatcacctcggccacataccagtccgcgataccgccgcgtggtacgcaggccgtggtgctcaaggtctaccagaacgccggcggcacgcacccaacgaccacgtacaaggccttcgattgggaccaggcctatcgcaagccaatcacctatgacacgctgtggcaggctgacaccgatccgctgccagtcgtcttccccattgtgcaaggtgaactgagcaagcagaccggacaacaggtatcgatagcgccgaatgccggcttggacccggtgaattatcagaacttcgcagtcacgaacgacggggtgattttcttcttcaacccgggggagttgctgcccgaagcagccggcccaacccaggtattggtcccacgttccgcgatcgactcgatgctggccgaattctaggcggccgcg

SEQ ID NO: 141 - protein, 1127 aa, Artificial Sequence
  Description of Artificial Sequence: Synthetic polypeptide
RLQLQESGPGLLKPSVTLSLTCTVSGDSVASSSYYWGWVRQPPGKGLEWIGTINFSGNMYYSPSLRSRVTMSADMSENSFYLKLDSVTAADTAVYYCAAGHLVMGFGAHWGQGKLVSVSPASTKGPSVFPLAPCSRSTSESTAALGCLVKDYFPEPVTVSWNSGALTSGVHTFPAVLQSSGLYSLSSVVTVPSSSLGTKTYTCNVDHKPSNTKVDKRVESKYGPPCPPCPAPEFEGGPSVFLFPPKPKDTLMISRTPEVTCVVVDVSQEDPEVQFNWYVDGVEVHNAKTKPREEQFNSTYRVVSVLTVLHQDWLNGKEYKCKVSNKGLPSSIEKTISKAKGQPREPQVYTLPPSQEEMTKNQVSLTCLVKGFYPSDIAVEWESNGQPENNYKTTPPVLDSDGSFFLYSRLTVDKSRWQEGNVFSCSVMHEALHNHYTQKSLSLSLGKASQTPTNTISVTPTNNSTPTNNSNPKPNPASSRPGLPVEYLQVPSPSMGRDIKVQFQSGGNNSPAVYLLDGLRAQDDYNGWDINTPAFEWYYQSGLSIVMPVGGQSSFYSDWYSPACGKAGCQTYKWETFLTSELPQWLSANRAVKPTGSAAIGLSMAGSSAMILAAYHPQQFIYAGSLSALLDPSQGMGPSLIGLAMGDAGGYKAADMWGPSSDPAWERNDPTQQIPKLVANNTRLWVYCGNGTPNELGGANIPAEFLENFVRSSNLKFQDAYNAAGGHNAVFNFPPNGTHSWEYWGAQLNAMKGDLQSSLGAGEFPTSTPADSSTITPTATPTATPTIKGTSMTEQQWNFAGIEAAASAIQGNVTSIHSLLDEGKQSLTKLAAAWGGSGSEAYQGVQQKWDATATELNNALQNLARTISEAGQAMASTEGNVTGMFAKLGGAPTNGSITVAATAPTVTPTVNATPSAASSAAPKTYCEELKGTDTGQACQIQMSDPAYNINISLPSYYPDQKSLENYIAQTRDKFLSAATSSTPREAPYELNITSATYQSAIPPRGTQAVVLKVYQNAGGTHPTTTYKAFDWDQAYRKPITYDTLWQADTDPLPVVFPIVQGELSKQTGQQVSIAPNAGLDPVNYQNFAVTNDGVIFFFNPGELLPEAAGPTQVLVPRSAIDSMLAEF

SEQ ID NO: 142 - DNA, 3466 bp, Artificial Sequence
  Description of Artificial Sequence: Synthetic polynucleotide
atggacctcctgtgcaagaacatgaagcacctgtggttcttcctcctgctggtggcggctcccagatgggtcctgtcccggctgcagctgcaggagtcgggcccaggcctgctgaagccttcggtgaccctgtccctcacctgcactgtctcgggtgactccgtcgccagtagttcttattactggggctgggtccgtcagcccccagggaagggactcgagtggatagggactatcaattttagtggcaatatgtattatagtccgtccctcaggagtcgagtgaccatgtcggcagacatgtccgagaactccttctatctgaaattggactctgtgaccgcagcagacacggccgtctattattgtgcggcaggacacctcgttatgggatttggggcccactggggacagggaaaactggtctccgtctctccagcttccaccaagggcccatccgtcttccccctggcgccctgctccaggagcacctccgagagcacagccgccctgggctgcctggtcaaggactacttccccgaaccggtgacggtgtcgtggaactcaggcgccctgaccagcggcgtgcacaccttcccggctgtcctacagtcctcaggactctactccctcagcagcgtggtgaccgtgccctccagcagcttgggcacgaagacctacacctgcaacgtagatcacaagcccagcaacaccaaggtggacaagagagttgagtccaaatatggtcccccatgcccaccctgcccagcacctgagttcgaagggggaccatcagtcttcctgttccccccaaaacccaaggacactctcatgatctcccggacccctgaggtcacgtgcgtggtggtggacgtgagccaggaagaccccgaggtccagttcaactggtacgtggatggcgtggaggtgcataatgccaagacaaagccgcgggaggagcagttcaacagcacgtaccgtgtggtcagcgtcctcaccgtcctgcaccaggactggctgaacggcaaggagtacaagtgcaaggtctccaacaaaggcctcccgtcctccatcgagaaaaccatctccaaagccaaagggcagccccgagagccacaggtgtacaccctgcccccatcccaggaggagatgaccaagaaccaggtcagcctgacctgcctggtcaaaggcttctaccccagcgacatcgccgtggagtgggagagcaatgggcagccggagaacaactacaagaccacgcctcccgtgctggactccgacggctccttcttcctctacagcaggctaaccgtggacaagagcaggtggcaggaggggaatgtcttctcatgctccgtgatgcatgaggctctgcacaaccactacacacagaagagcctctccctgtctctgggtaaagctagtcagacccccaccaacaccatcagcgtgacccccaccaacaacagcacccccaccaacaacagcaaccccaagcccaaccccgctagcgccgcgcccaagacctactgcgaggagttgaaaggcaccgataccggccaggcgtgccagattcaaatgtccgacccggcctacaacatcaacatcagcctgcccagttactaccccgaccagaagtcgctggaaaattacatcgcccagacgcgcgacaagttcctcagcgcggccacatcgtccactccacgcgaagccccctacgaattgaatatcacctcggccacataccagtccgcgataccgccgcgtggtacgcaggccgtggtgctcaaggtctaccagaacgccggcggcacgcacccaacgaccacgtacaaggccttcgattgggaccaggcctatcgcaagccaatcacctatgacacgctgtggcaggctgacaccgatccgctgccagtcgtcttccccattgtgcaaggtgaactgagcaagcagaccggacaacaggtatcgatagcgccgaatgccggcttggacccggtgaattatcagaacttcgcagtcacgaacgacggggtgattttcttcttcaacccgggggagttgctgcccgaagcagccggcccaacccaggtattggtcccacgttccgcgatcgactcgatgctggccaagcttggcggcgcgcctaccaacggcagcatcaccgtggccgccaccgcccccaccgtgacccccaccgtgaacgccacccccagcgccgcctctagcatgtcgcaaatcatgtacaactaccccgcgatgttgggtcacgccggggatatggccggatatgccggcacgctgcagagcttgggtgccgagatcgccgtggagcaggccgcgttgcagagtgcgtggcagggcgataccgggatcacgtatcaggcgtggcaggcacagtggaaccaggccatggaagatttggtgcgggcctatcatgcgatgtccagcacccatgaagccaacaccatggcgatgatggcccgcgacacggccgaagccgccaaatggggcggcgaattccccaccagcacccccgccgacagcagcaccatcacccccaccgccacccccaccgccacccccaccatcaagggcactagctcccggccggggctgccggtcgagtacctgcaggtgccgtcgccgtcgatgggccgcgacatcaaggttcagttccagagcggtgggaacaactcacctgcggtttatctgctcgacggcctgcgcgcccaagacgactacaacggctgggatatcaacaccccggcgttcgagtggtactaccagtcgggactgtcgatagtcatgccggtcggcgggcagtccagcttctacagcgactggtacagcccggcctgcggtaaggctggctgccagacttacaagtgggaaaccttcctgaccagcgagctgccgcaatggttgtccgccaacagggccgtgaagcccaccggcagcgctgcaatcggcttgtcgatggccggctcgtcggcaatgatcttggccgcctaccacccccagcagttcatctacgccggctcgctgtcggccctgctggacccctctcaggggatggggcctagcctgatcggcctcgcgatgggtgacgccggcggttacaaggccgcagacatgtggggtccctcgagtgacccggcatgggagcgcaacgaccctacgcagcagatccccaagctggtcgcaaacaacacccggctatgggtttattgcgggaacggcaccccgaacgagttgggcggtgccaacatacccgccgagttcttggagaacttcgttcgtagcagcaacctgaagttccaggatgcgtacaacgccgcgggcgggcacaacgccgtgttcaacttcccgcccaacggcacgcacagctgggagtactggggcgctcagctcaacgccatgaagggtgacctgcagagttcgttaggcgccggctgagcggccg

SEQ ID NO: 143 - protein, 1126 aa, Artificial Sequence
  Description of Artificial Sequence: Synthetic polypeptide
RLQLQESGPGLLKPSVTLSLTCTVSGDSVASSSYYWGWVRQPPGKGLEWIGTINFSGNMYYSPSLRSRVTMSADMSENSFYLKLDSVTAADTAVYYCAAGHLVMGFGAHWGQGKLVSVSPASTKGPSVFPLAPCSRSTSESTAALGCLVKDYFPEPVTVSWNSGALTSGVHTFPAVLQSSGLYSLSSVVTVPSSSLGTKTYTCNVDHKPSNTKVDKRVESKYGPPCPPCPAPEFEGGPSVFLFPPKPKDTLMISRTPEVTCVVVDVSQEDPEVQFNWYVDGVEVHNAKTKPREEQFNSTYRVVSVLTVLHQDWLNGKEYKCKVSNKGLPSSIEKTISKAKGQPREPQVYTLPPSQEEMTKNQVSLTCLVKGFYPSDIAVEWESNGQPENNYKTTPPVLDSDGSFFLYSRLTVDKSRWQEGNVFSCSVMHEALHNHYTQKSLSLSLGKASQTPTNTISVTPTNNSTPTNNSNPKPNPASAAPKTYCEELKGTDTGQACQIQMSDPAYNINISLPSYYPDQKSLENYIAQTRDKFLSAATSSTPREAPYELNITSATYQSAIPPRGTQAVVLKVYQNAGGTHPTTTYKAFDWDQAYRKPITYDTLWQADTDPLPVVFPIVQGELSKQTGQQVSIAPNAGLDPVNYQNFAVTNDGVIFFFNPGELLPEAAGPTQVLVPRSAIDSMLAKLGGAPTNGSITVAATAPTVTPTVNATPSAASSMSQIMYNYPAMLGHAGDMAGYAGTLQSLGAEIAVEQAALQSAWQGDTGITYQAWQAQWNQAMEDLVRAYHAMSSTHEANTMAMMARDTAEAAKWGGEFPTSTPADSSTITPTATPTATPTIKGTSSRPGLPVEYLQVPSPSMGRDIKVQFQSGGNNSPAVYLLDGLRAQDDYNGWDINTPAFEWYYQSGLSIVMPVGGQSSFYSDWYSPACGKAGCQTYKWETFLTSELPQWLSANRAVKPTGSAAIGLSMAGSSAMILAAYHPQQFIYAGSLSALLDPSQGMGPSLIGLAMGDAGGYKAADMWGPSSDPAWERNDPTQQIPKLVANNTRLWVYCGNGTPNELGGANIPAEFLENFVRSSNLKFQDAYNAAGGHNAVFNFPPNGTHSWEYWGAQLNAMKGDLQSSLGAG

SEQ ID NO: 144 - DNA, 3456 bp, Artificial Sequence
  Description of Artificial Sequence: Synthetic polynucleotide
atggaccccaaaggctccctttcctggagaatacttctgtttctctccctggcttttgagttgtcgtacggagaagtgaagctggtggagtctgggggaggcttagtgcagcctggagggtccctgaaactctcctgtgcaacctctggattcactttcagtgactattacatgtattgggttcgccagactccagagaagaggctggagtgggtcgcatacattaattctggtggtggtagcacctattatccagacactgtaaagggccgattcaccatctccagagacaatgccaagaacaccctgtacctgcaaatgagccggctgaagtctgaggacacagccatgtattactgtgcaagacgggggttaccgttccatgctatggactattggggtcaaggaacctcagtcaccgtctcctcagccaaaacgaagggcccatccgtcttccccctggcgccctgctccaggagcacctccgagagcacagccgccctgggctgcctggtcaaggactacttccccgaaccggtgacggtgtcgtggaactcaggcgccctgaccagcggcgtgcacaccttcccggctgtcctacagtcctcaggactctactccctcagcagcgtggtgaccgtgccctccagcagcttgggcacgaagacctacacctgcaacgtagatcacaagcccagcaacaccaaggtggacaagagagttgagtccaaatatggtcccccatgcccaccctgcccagcacctgagttcgaagggggaccatcagtcttcctgttccccccaaaacccaaggacactctcatgatctcccggacccctgaggtcacgtgcgtggtggtggacgtgagccaggaagaccccgaggtccagttcaactggtacgtggatggcgtggaggtgcataatgccaagacaaagccgcgggaggagcagttcaacagcacgtaccgtgtggtcagcgtcctcaccgtcctgcaccaggactggctgaacggcaaggagtacaagtgcaaggtctccaacaaaggcctcccgtcctccatcgagaaaaccatctccaaagccaaagggcagccccgagagccacaggtgtacaccctgcccccatcccaggaggagatgaccaagaaccaggtcagcctgacctgcctggtcaaaggcttctaccccagcgacatcgccgtggagtgggagagcaatgggcagccggagaacaactacaagaccacgcctcccgtgctggactccgacggctccttcttcctctacagcaggctaaccgtggacaagagcaggtggcaggaggggaatgtcttctcatgctccgtgatgcatgaggctctgcacaaccactacacacagaagagcctctccctgtctctgggtaaagctagtcagacccccaccaacaccatcagcgtgacccccaccaacaacagcacccccaccaacaacagcaaccccaagcccaaccccgctagctcccggccggggctgccggtcgagtacctgcaggtgccgtcgccgtcgatgggccgcgacatcaaggttcagttccagagcggtgggaacaactcacctgcggtttatctgctcgacggcctgcgcgcccaagacgactacaacggctgggatatcaacaccccggcgttcgagtggtactaccagtcgggactgtcgatagtcatgccggtcggcgggcagtccagcttctacagcgactggtacagcccggcctgcggtaaggctggctgccagacttacaagtgggaaaccttcctgaccagcgagctgccgcaatggttgtccgccaacagggccgtgaagcccaccggcagcgctgcaatcggcttgtcgatggccggctcgtcggcaatgatcttggccgcctaccacccccagcagttcatctacgccggctcgctgtcggccctgctggacccctctcaggggatggggcctagcctgatcggcctcgcgatgggtgacgccggcggttacaaggccgcagacatgtggggtccctcgagtgacccggcatgggagcgcaacgaccctacgcagcagatccccaagctggtcgcaaacaacacccggctatgggtttattgcgggaacggcaccccgaacgagttgggcggtgccaacatacccgccgagttcttggagaacttcgttcgtagcagcaacctgaagttccaggatgcgtacaacgccgcgggcgggcacaacgccgtgttcaacttcccgcccaacggcacgcacagctgggagtactggggcgctcagctcaacgccatgaagggtgacctgcagagttcgttaggcgccggcgaattccccaccagcacccccgccgacagcagcaccatcacccccaccgccacccccaccgccacccccaccatcaagggcactagcatgacagagcagcagtggaatttcgcgggtatcgaggccgcggcaagcgcaatccagggaaatgtcacgtccattcattccctccttgacgaggggaagcagtccctgaccaagctcgcagcggcctggggcggtagcggttcggaggcgtaccagggtgtccagcaaaaatgggacgccacggctaccgagctgaacaacgcgctgcagaacctggcgcggacgatcagcgaagccggtcaggcaatggcttcgaccgaaggcaacgtcactgggatgttcgcaaagcttggcggcgcgcctaccaacggcagcatcaccgtggccgccaccgcccccaccgtgacccccaccgtgaacgccacccccagcgccgcctctagcgccgcgcccaagacctactgcgaggagttgaaaggcaccgataccggccaggcgtgccagattcaaatgtccgacccggcctacaacatcaacatcagcctgcccagttactaccccgaccagaagtcgctggaaaattacatcgcccagacgcgcgacaagttcctcagcgcggccacatcgtccactccacgcgaagccccctacgaattgaatatcacctcggccacataccagtccgcgataccgccgcgtggtacgcaggccgtggtgctcaaggtctaccagaacgccggcggcacgcacccaacgaccacgtacaaggccttcgattgggaccaggcctatcgcaagccaatcacctatgacacgctgtggcaggctgacaccgatccgctgccagtcgtcttccccattgtgcaaggtgaactgagcaagcagaccggacaacaggtatcgatagcgccgaatgccggcttggacccggtgaattatcagaacttcgcagtcacgaacgacggggtgattttcttcttcaacccgggggagttgctgcccgaagcagccggcccaacccaggtattggtcccacgttccgcgatcgactcgatgctggccgaattctaggcg

SEQ ID NO: 145 - protein, 1126 aa, Artificial Sequence
  Description of Artificial Sequence: Synthetic polypeptide
EVKLVESGGGLVQPGGSLKLSCATSGFTFSDYYMYWVRQTPEKRLEWVAYINSGGGSTYYPDTVKGRFTISRDNAKNTLYLQMSRLKSEDTAMYYCARRGLPFHAMDYWGQGTSVTVSSAKTKGPSVFPLAPCSRSTSESTAALGCLVKDYFPEPVTVSWNSGALTSGVHTFPAVLQSSGLYSLSSVVTVPSSSLGTKTYTCNVDHKPSNTKVDKRVESKYGPPCPPCPAPEFEGGPSVFLFPPKPKDTLMISRTPEVTCVVVDVSQEDPEVQFNWYVDGVEVHNAKTKPREEQFNSTYRVVSVLTVLHQDWLNGKEYKCKVSNKGLPSSIEKTISKAKGQPREPQVYTLPPSQEEMTKNQVSLTCLVKGFYPSDIAVEWESNGQPENNYKTTPPVLDSDGSFFLYSRLTVDKSRWQEGNVFSCSVMHEALHNHYTQKSLSLSLGKASQTPTNTISVTPTNNSTPTNNSNPKPNPASSRPGLPVEYLQVPSPSMGRDIKVQFQSGGNNSPAVYLLDGLRAQDDYNGWDINTPAFEWYYQSGLSIVMPVGGQSSFYSDWYSPACGKAGCQTYKWETFLTSELPQWLSANRAVKPTGSAAIGLSMAGSSAMILAAYHPQQFIYAGSLSALLDPSQGMGPSLIGLAMGDAGGYKAADMWGPSSDPAWERNDPTQQIPKLVANNTRLWVYCGNGTPNELGGANIPAEFLENFVRSSNLKFQDAYNAAGGHNAVFNFPPNGTHSWEYWGAQLNAMKGDLQSSLGAGEFPTSTPADSSTITPTATPTATPTIKGTSMTEQQWNFAGIEAAASAIQGNVTSIHSLLDEGKQSLTKLAAAWGGSGSEAYQGVQQKWDATATELNNALQNLARTISEAGQAMASTEGNVTGMFAKLGGAPTNGSITVAATAPTVTPTVNATPSAASSAAPKTYCEELKGTDTGQACQIQMSDPAYNINISLPSYYPDQKSLENYIAQTRDKFLSAATSSTPREAPYELNITSATYQSAIPPRGTQAVVLKVYQNAGGTHPTTTYKAFDWDQAYRKPITYDTLWQADTDPLPVVFPIVQGELSKQTGQQVSIAPNAGLDPVNYQNFAVTNDGVIFFFNPGELLPEAAGPTQVLVPRSAIDSMLAEF

SEQ ID NO: 146 - DNA, 3456 bp, Artificial Sequence
  Description of Artificial Sequence: Synthetic polynucleotide
atggaccccaaaggctccctttcctggagaatacttctgtttctctccctggcttttgagttgtcgtacggagaagtgaagctggtggagtctgggggaggcttagtgcagcctggagggtccctgaaactctcctgtgcaacctctggattcactttcagtgactattacatgtattgggttcgccagactccagagaagaggctggagtgggtcgcatacattaattctggtggtggtagcacctattatccagacactgtaaagggccgattcaccatctccagagacaatgccaagaacaccctgtacctgcaaatgagccggctgaagtctgaggacacagccatgtattactgtgcaagacgggggttaccgttccatgctatggactattggggtcaaggaacctcagtcaccgtctcctcagccaaaacgaagggcccatccgtcttccccctggcgccctgctccaggagcacctccgagagcacagccgccctgggctgcctggtcaaggactacttccccgaaccggtgacggtgtcgtggaactcaggcgccctgaccagcggcgtgcacaccttcccggctgtcctacagtcctcaggactctactccctcagcagcgtggtgaccgtgccctccagcagcttgggcacgaagacctacacctgcaacgtagatcacaagcccagcaacaccaaggtggacaagagagttgagtccaaatatggtcccccatgcccaccctgcccagcacctgagttcgaagggggaccatcagtcttcctgttccccccaaaacccaaggacactctcatgatctcccggacccctgaggtcacgtgcgtggtggtggacgtgagccaggaagaccccgaggtccagttcaactggtacgtggatggcgtggaggtgcataatgccaagacaaagccgcgggaggagcagttcaacagcacgtaccgtgtggtcagcgtcctcaccgtcctgcaccaggactggctgaacggcaaggagtacaagtgcaaggtctccaacaaaggcctcccgtcctccatcgagaaaaccatctccaaagccaaagggcagccccgagagccacaggtgtacaccctgcccccatcccaggaggagatgaccaagaaccaggtcagcctgacctgcctggtcaaaggcttctaccccagcgacatcgccgtggagtgggagagcaatgggcagccggagaacaactacaagaccacgcctcccgtgctggactccgacggctccttcttcctctacagcaggctaaccgtggacaagagcaggtggcaggaggggaatgtcttctcatgctccgtgatgcatgaggctctgcacaaccactacacacagaagagcctctccctgtctctgggtaaagctagtcagacccccaccaacaccatcagcgtgacccccaccaacaacagcacccccaccaacaacagcaaccccaagcccaaccccgctagcgccgcgcccaagacctactgcgaggagttgaaaggcaccgataccggccaggcgtgccagattcaaatgtccgacccggcctacaacatcaacatcagcctgcccagttactaccccgaccagaagtcgctggaaaattacatcgcccagacgcgcgacaagttcctcagcgcggccacatcgtccactccacgcgaagccccctacgaattgaatatcacctcggccacataccagtccgcgataccgccgcgtggtacgcaggccgtggtgctcaaggtctaccagaacgccggcggcacgcacccaacgaccacgtacaaggccttcgattgggaccaggcctatcgcaagccaatcacctatgacacgctgtggcaggctgacaccgatccgctgccagtcgtcttccccattgtgcaaggtgaactgagcaagcagaccggacaacaggtatcgatagcgccgaatgccggcttggacccggtgaattatcagaacttcgcagtcacgaacgacggggtgattttcttcttcaacccgggggagttgctgcccgaagcagccggcccaacccaggtattggtcccacgttccgcgatcgactcgatgctggccaagcttggcggcgcgcctaccaacggcagcatcaccgtggccgccaccgcccccaccgtgacccccaccgtgaacgccacccccagcgccgcctctagcatgtcgcaaatcatgtacaactaccccgcgatgttgggtcacgccggggatatggccggatatgccggcacgctgcagagcttgggtgccgagatcgccgtggagcaggccgcgttgcagagtgcgtggcagggcgataccgggatcacgtatcaggcgtggcaggcacagtggaaccaggccatggaagatttggtgcgggcctatcatgcgatgtccagcacccatgaagccaacaccatggcgatgatggcccgcgacacggccgaagccgccaaatggggcggcgaattccccaccagcacccccgccgacagcagcaccatcacccccaccgccacccccaccgccacccccaccatcaagggcactagctcccggccggggctgccggtcgagtacctgcaggtgccgtcgccgtcgatgggccgcgacatcaaggttcagttccagagcggtgggaacaactcacctgcggtttatctgctcgacggcctgcgcgcccaagacgactacaacggctgggatatcaacaccccggcgttcgagtggtactaccagtcgggactgtcgatagtcatgccggtcggcgggcagtccagcttctacagcgactggtacagcccggcctgcggtaaggctggctgccagacttacaagtgggaaaccttcctgaccagcgagctgccgcaatggttgtccgccaacagggccgtgaagcccaccggcagcgctgcaatcggcttgtcgatggccggctcgtcggcaatgatcttggccgcctaccacccccagcagttcatctacgccggctcgctgtcggccctgctggacccctctcaggggatggggcctagcctgatcggcctcgcgatgggtgacgccggcggttacaaggccgcagacatgtggggtccctcgagtgacccggcatgggagcgcaacgaccctacgcagcagatccccaagctggtcgcaaacaacacccggctatgggtttattgcgggaacggcaccccgaacgagttgggcggtgccaacatacccgccgagttcttggagaacttcgttcgtagcagcaacctgaagttccaggatgcgtacaacgccgcgggcgggcacaacgccgtgttcaacttcccgcccaacggcacgcacagctgggagtactggggcgctcagctcaacgccatgaagggtgacctgcagagttcgttaggcgccggctgagcggcc

SEQ ID NO: 147 - protein, 1125 aa, Artificial Sequence
  Description of Artificial Sequence: Synthetic polypeptide
EVKLVESGGGLVQPGGSLKLSCATSGFTFSDYYMYWVRQTPEKRLEWVAYINSGGGSTYYPDTVKGRFTISRDNAKNTLYLQMSRLKSEDTAMYYCARRGLPFHAMDYWGQGTSVTVSSAKTKGPSVFPLAPCSRSTSESTAALGCLVKDYFPEPVTVSWNSGALTSGVHTFPAVLQSSGLYSLSSVVTVPSSSLGTKTYTCNVDHKPSNTKVDKRVESKYGPPCPPCPAPEFEGGPSVFLFPPKPKDTLMISRTPEVTCVVVDVSQEDPEVQFNWYVDGVEVHNAKTKPREEQFNSTYRVVSVLTVLHQDWLNGKEYKCKVSNKGLPSSIEKTISKAKGQPREPQVYTLPPSQEEMTKNQVSLTCLVKGFYPSDIAVEWESNGQPENNYKTTPPVLDSDGSFFLYSRLTVDKSRWQEGNVFSCSVMHEALHNHYTQKSLSLSLGKASQTPTNTISVTPTNNSTPTNNSNPKPNPASAAPKTYCEELKGTDTGQACQIQMSDPAYNINISLPSYYPDQKSLENYIAQTRDKFLSAATSSTPREAPYELNITSATYQSAIPPRGTQAVVLKVYQNAGGTHPTTTYKAFDWDQAYRKPITYDTLWQADTDPLPVVFPIVQGELSKQTGQQVSIAPNAGLDPVNYQNFAVTNDGVIFFFNPGELLPEAAGPTQVLVPRSAIDSMLAKLGGAPTNGSITVAATAPTVTPTVNATPSAASSMSQIMYNYPAMLGHAGDMAGYAGTLQSLGAEIAVEQAALQSAWQGDTGITYQAWQAQWNQAMEDLVRAYHAMSSTHEANTMAMMARDTAEAAKWGGEFPTSTPADSSTITPTATPTATPTIKGTSSRPGLPVEYLQVPSPSMGRDIKVQFQSGGNNSPAVYLLDGLRAQDDYNGWDINTPAFEWYYQSGLSIVMPVGGQSSFYSDWYSPACGKAGCQTYKWETFLTSELPQWLSANRAVKPTGSAAIGLSMAGSSAMILAAYHPQQFIYAGSLSALLDPSQGMGPSLIGLAMGDAGGYKAADMWGPSSDPAWERNDPTQQIPKLVANNTRLWVYCGNGTPNELGGANIPAEFLENFVRSSNLKFQDAYNAAGGHNAVFNFPPNGTHSWEYWGAQLNAMKGDLQSSLGAG

SEQ ID NO: 148 - DNA, 2100 bp, Artificial Sequence
  Description of Artificial Sequence: Synthetic polynucleotide
atgaacaggcttacttcctcattgctgctgctgattgtccctgcatatgtcctgtcccaggttactctgaaagagtctggccctgggatattgcagccctcccagaccctcagtctgacttgttctttctctgggttttcactgagcacttctggtatgggtctgagctggattcgtcagccttcaggaaagggtctggagtggctggcacacatttactgggatgatgacaagcgctataacccatccctgaagagccggctcacaatctccaaggatacctccagcaaccaggttttcctcaagatcaccattgtggacactgcagatgctgccacatactactgtgctcgaagctcccattactacggttatggctacgggggatacttcgatgtctggggcgcagggaccacggtcaccgtctcctcagccaaaacgaagggcccatccgtcttccccctggcgccctgctccaggagcacctccgagagcacagccgccctgggctgcctggtcaaggactacttccccgaaccggtgacggtgtcgtggaactcaggcgccctgaccagcggcgtgcacaccttcccggctgtcctacagtcctcaggactctactccctcagcagcgtggtgaccgtgccctccagcagcttgggcacgaagacctacacctgcaacgtagatcacaagcccagcaacaccaaggtggacaagagagttgagtccaaatatggtcccccatgcccaccctgcccagcacctgagttcgaagggggaccatcagtcttcctgttccccccaaaacccaaggacactctcatgatctcccggacccctgaggtcacgtgcgtggtggtggacgtgagccaggaagaccccgaggtccagttcaactggtacgtggatggcgtggaggtgcataatgccaagacaaagccgcgggaggagcagttcaacagcacgtaccgtgtggtcagcgtcctcaccgtcctgcaccaggactggctgaacggcaaggagtacaagtgcaaggtctccaacaaaggcctcccgtcctccatcgagaaaaccatctccaaagccaaagggcagccccgagagccacaggtgtacaccctgcccccatcccaggaggagatgaccaagaaccaggtcagcctgacctgcctggtcaaaggcttctaccccagcgacatcgccgtggagtgggagagcaatgggcagccggagaacaactacaagaccacgcctcccgtgctggactccgacggctccttcttcctctacagcaggctaaccgtggacaagagcaggtggcaggaggggaatgtcttctcatgctccgtgatgcatgaggctctgcacaaccactacacacagaagagcctctccctgtctctgggtaaagctagcatggcagagatgaagaccgatgccgctaccctcgcgcaggaggcaggtaatttcgagcggatctccggcgacctgaaaacccagatcgaccaggtggagtcgacggcaggttcgttgcagggccagtggcgcggcgcggcggggacggccgcccaggccgcggtggtgcgcttccaagaagcagccaataagcagaagcaggaactcgacgagatctcgacgaatattcgtcaggccggcgtccaatactcgagggccgacgaggagcagcagcaggcgctgtcctcgcaaatgggcttcgaattccccaccagcacccccgccgacagcagcaccatcacccccaccgccacccccaccgccacccccaccatcaagggcactagcatgacagagcagcagtggaatttcgcgggtatcgaggccgcggcaagcgcaatccagggaaatgtcacgtccattcattccctccttgacgaggggaagcagtccctgaccaagctcgcagcggcctggggcggtagcggttcggaggcgtaccagggtgtccagcaaaaatgggacgccacggctaccgagctgaacaacgcgctgcagaacctggcgcggacgatcagcgaagccggtcaggcaatggcttcgaccgaaggcaacgtcactgggatgttcgcataggcggcc

SEQ ID NO: 149 - protein, 678 aa, Artificial Sequence [sequence omitted]

SEQ ID NO: 150 - DNA, 2106 bp, Artificial Sequence
  Description of Artificial Sequence: Synthetic polynucleotide
atggacctcctgtgcaagaacatgaagcacctgtggttcttcctcctgctggtggcggctcccagatgggtcctgtcccggctgcagctgcaggagtcgggcccaggcctgctgaagccttcggtgaccctgtccctcacctgcactgtctcgggtgactccgtcgccagtagttcttattactggggctgggtccgtcagcccccagggaagggactcgagtggatagggactatcaattttagtggcaatatgtattatagtccgtccctcaggagtcgagtgaccatgtcggcagacatgtccgagaactccttctatctgaaattggactctgtgaccgcagcagacacggccgtctattattgtgcggcaggacacctcgttatgggatttggggcccactggggacagggaaaactggtctccgtctctccagcttccaccaagggcccatccgtcttccccctggcgccctgctccaggagcacctccgagagcacagccgccctgggctgcctggtcaaggactacttccccgaaccggtgacggtgtcgtggaactcaggcgccctgaccagcggcgtgcacaccttcccggctgtcctacagtcctcaggactctactccctcagcagcgtggtgaccgtgccctccagcagcttgggcacgaagacctacacctgcaacgtagatcacaagcccagcaacaccaaggtggacaagagagttgagtccaaatatggtcccccatgcccaccctgcccagcacctgagttcgaagggggaccatcagtcttcctgttccccccaaaacccaaggacactctcatgatctcccggacccctgaggtcacgtgcgtggtggtggacgtgagccaggaagaccccgaggtccagttcaactggtacgtggatggcgtggaggtgcataatgccaagacaaagccgcgggaggagcagttcaacagcacgtaccgtgtggtcagcgtcctcaccgtcctgcaccaggactggctgaacggcaaggagtacaagtgcaaggtctccaacaaaggcctcccgtcctccatcgagaaaaccatctccaaagccaaagggcagccccgagagccacaggtgtacaccctgcccccatcccaggaggagatgaccaagaaccaggtcagcctgacctgcctggtcaaaggcttctaccccagcgacatcgccgtggagtgggagagcaatgggcagccggagaacaactacaagaccacgcctcccgtgctggactccgacggctccttcttcctctacagcaggctaaccgtggacaagagcaggtggcaggaggggaatgtcttctcatgctccgtgatgcatgaggctctgcacaaccactacacacagaagagcctctccctgtctctgggtaaagctagcatggcagagatgaagaccgatgccgctaccctcgcgcaggaggcaggtaatttcgagcggatctccggcgacctgaaaacccagatcgaccaggtggagtcgacggcaggttcgttgcagggccagtggcgcggcgcggcggggacggccgcccaggccgcggtggtgcgcttccaagaagcagccaataagcagaagcaggaactcgacgagatctcgacgaatattcgtcaggccggcgtccaatactcgagggccgacgaggagcagcagcaggcgctgtcctcgcaaatgggcttcgaattccccaccagcacccccgccgacagcagcaccatcacccccaccgccacccccaccgccacccccaccatcaagggcactagcatgacagagcagcagtggaatttcgcgggtatcgaggccgcggcaagcgcaatccagggaaatgtcacgtccattcattccctccttgacgaggggaagcagtccctgaccaagctcgcagcggcctggggcggtagcggttcggaggcgtaccagggtgtccagcaaaaatgggacgccacggctaccgagctgaacaacgcgctgcagaacctggcgcggacgatcagcgaagccggtcaggcaatggcttcgaccgaaggcaacgtcactgggatgttcgcataggcggcc

SEQ ID NO: 151 - protein, 673 aa, Artificial Sequence
  Description of Artificial Sequence: Synthetic polypeptide
RLQLQESGPGLLKPSVTLSLTCTVSGDSVASSSYYWGWVRQPPGKGLEWIGTINFSGNMYYSPSLRSRVTMSADMSENSFYLKLDSVTAADTAVYYCAAGHLVMGFGAHWGQGKLVSVSPASTKGPSVFPLAPCSRSTSESTAALGCLVKDYFPEPVTVSWNSGALTSGVHTFPAVLQSSGLYSLSSVVTVPSSSLGTKTYTCNVDHKPSNTKVDKRVESKYGPPCPPCPAPEFEGGPSVFLFPPKPKDTLMISRTPEVTCVVVDVSQEDPEVQFNWYVDGVEVHNAKTKPREEQFNSTYRVVSVLTVLHQDWLNGKEYKCKVSNKGLPSSIEKTISKAKGQPREPQVYTLPPSQEEMTKNQVSLTCLVKGFYPSDIAVEWESNGQPENNYKTTPPVLDSDGSFFLYSRLTVDKSRWQEGNVFSCSVMHEALHNHYTQKSLSLSLGKASMAEMKTDAATLAQEAGNFERISGDLKTQIDQVESTAGSLQGQWRGAAGTAAQAAVVRFQEAANKQKQELDEISTNIRQAGVQYSRADEEQQQALSSQMGFEFPTSTPADSSTITPTATPTATPTIKGTSMTEQQWNFAGIEAAASAIQGNVTSIHSLLDEGKQSLTKLAAAWGGSGSEAYQGVQQKWDATATELNNALQNLARTISEAGQAMASTEGNVTGMFA

SEQ ID NO: 152 - DNA, 2097 bp, Artificial Sequence
  Description of Artificial Sequence: Synthetic polynucleotide
atggaccccaaaggctccctttcctggagaatacttctgtttctctccctggcttttgagttgtcgtacggagaagtgaagctggtggagtctgggggaggcttagtgcagcctggagggtccctgaaactctcctgtgcaacctctggattcactttcagtgactattacatgtattgggttcgccagactccagagaagaggctggagtgggtcgcatacattaattctggtggtggtagcacctattatccagacactgtaaagggccgattcaccatctccagagacaatgccaagaacaccctgtacctgcaaatgagccggctgaagtctgaggacacagccatgtattactgtgcaagacgggggttaccgttccatgctatggactattggggtcaaggaacctcagtcaccgtctcctcagccaaaacgaagggcccatccgtcttccccctggcgccctgctccaggagcacctccgagagcacagccgccctgggctgcctggtcaaggactacttccccgaaccggtgacggtgtcgtggaactcaggcgccctgaccagcggcgtgcacaccttcccggctgtcctacagtcctcaggactctactccctcagcagcgtggtgaccgtgccctccagcagcttgggcacgaagacctacacctgcaacgtagatcacaagcccagcaacaccaaggtggacaagagagttgagtccaaatatggtcccccatgcccaccctgcccagcacctgagttcgaagggggaccatcagtcttcctgttccccccaaaacccaaggacactctcatgatctcccggacccctgaggtcacgtgcgtggtggtggacgtgagccaggaagaccccgaggtccagttcaactggtacgtggatggcgtggaggtgcataatgccaagacaaagccgcgggaggagcagttcaacagcacgtaccgtgtggtcagcgtcctcaccgtcctgcaccaggactggctgaacggcaaggagtacaagtgcaaggtctccaacaaaggcctcccgtcctccatcgagaaaaccatctccaaagccaaagggcagccccgagagccacaggtgtacaccctgcccccatcccaggaggagatgaccaagaaccaggtcagcctgacctgcctggtcaaaggcttctaccccagcgacatcgccgtggagtgggagagcaatgggcagccggagaacaactacaagaccacgcctcccgtgctggactccgacggctccttcttcctctacagcaggctaaccgtggacaagagcaggtggcaggaggggaatgtcttctcatgctccgtgatgcatgaggctctgcacaaccactacacacagaagagcctctccctgtctctgggtaaagctagcatggcagagatgaagaccgatgccgctaccctcgcgcaggaggcaggtaatttcgagcggatctccggcgacctgaaaacccagatcgaccaggtggagtcgacggcaggttcgttgcagggccagtggcgcggcgcggcggggacggccgcccaggccgcggtggtgcgcttccaagaagcagccaataagcagaagcaggaactcgacgagatctcgacgaatattcgtcaggccggcgtccaatactcgagggccgacgaggagcagcagcaggcgctgtcctcgcaaatgggcttcgaattccccaccagcacccccgccgacagcagcaccatcacccccaccgccacccccaccgccacccccaccatcaagggcactagcatgacagagcagcagtggaatttcgcgggtatcgaggccgcggcaagcgcaatccagggaaatgtcacgtccattcattccctccttgacgaggggaagcagtccctgaccaagctcgcagcggcctggggcggtagcggttcggaggcgtaccagggtgtccagcaaaaatgggacgccacggctaccgagctgaacaacgcgctgcagaacctggcgcggacgatcagcgaagccggtcaggcaatggcttcgaccgaaggcaacgtcactgggatgttcgcataggcggcc

SEQ ID NO: 153 - protein, 672 aa, Artificial Sequence
  Description of Artificial Sequence: Synthetic polypeptide
EVKLVESGGGLVQPGGSLKLSCATSGFTFSDYYMYWVRQTPEKRLEWVAYINSGGGSTYYPDTVKGRFTISRDNAKNTLYLQMSRLKSEDTAMYYCARRGLPFHAMDYWGQGTSVTVSSAKTKGPSVFPLAPCSRSTSESTAALGCLVKDYFPEPVTVSWNSGALTSGVHTFPAVLQSSGLYSLSSVVTVPSSSLGTKTYTCNVDHKPSNTKVDKRVESKYGPPCPPCPAPEFEGGPSVFLFPPKPKDTLMISRTPEVTCVVVDVSQEDPEVQFNWYVDGVEVHNAKTKPREEQFNSTYRVVSVLTVLHQDWLNGKEYKCKVSNKGLPSSIEKTISKAKGQPREPQVYTLPPSQEEMTKNQVSLTCLVKGFYPSDIAVEWESNGQPENNYKTTPPVLDSDGSFFLYSRLTVDKSRWQEGNVFSCSVMHEALHNHYTQKSLSLSLGKASMAEMKTDAATLAQEAGNFERISGDLKTQIDQVESTAGSLQGQWRGAAGTAAQAAVVRFQEAANKQKQELDEISTNIRQAGVQYSRADEEQQQALSSQMGFEFPTSTPADSSTITPTATPTATPTIKGTSMTEQQWNFAGIEAAASAIQGNVTSIHSLLDEGKQSLTKLAAAWGGSGSEAYQGVQQKWDATATELNNALQNLARTISEAGQAMASTEGNVTGMFA

SEQ ID NO: 154 - DNA, 1941 bp, Artificial Sequence
  Description of Artificial Sequence: Synthetic polynucleotide
atgaacaggcttacttcctcattgctgctgctgattgtccctgcatatgtcctgtcccaggttactctgaaagagtctggccctgggatattgcagccctcccagaccctcagtctgacttgttctttctctgggttttcactgagcacttctggtatgggtctgagctggattcgtcagccttcaggaaagggtctggagtggctggcacacatttactgggatgatgacaagcgctataacccatccctgaagagccggctcacaatctccaaggatacctccagcaaccaggttttcctcaagatcaccattgtggacactgcagatgctgccacatactactgtgctcgaagctcccattactacggttatggctacgggggatacttcgatgtctggggcgcagggaccacggtcaccgtctcctcagccaaaacgaagggcccatccgtcttccccctggcgccctgctccaggagcacctccgagagcacagccgccctgggctgcctggtcaaggactacttccccgaaccggtgacggtgtcgtggaactcaggcgccctgaccagcggcgtgcacaccttcccggctgtcctacagtcctcaggactctactccctcagcagcgtggtgaccgtgccctccagcagcttgggcacgaagacctacacctgcaacgtagatcacaagcccagcaacaccaaggtggacaagagagttgagtccaaatatggtcccccatgcccaccctgcccagcacctgagttcgaagggggaccatcagtcttcctgttccccccaaaacccaaggacactctcatgatctcccggacccctgaggtcacgtgcgtggtggtggacgtgagccaggaagaccccgaggtccagttcaactggtacgtggatggcgtggaggtgcataatgccaagacaaagccgcgggaggagcagttcaacagcacgtaccgtgtggtcagcgtcctcaccgtcctgcaccaggactggctgaacggcaaggagtacaagtgcaaggtctccaacaaaggcctcccgtcctccatcgagaaaaccatctccaaagccaaagggcagccccgagagccacaggtgtacaccctgcccccatcccaggaggagatgaccaagaaccaggtcagcctgacctgcctggtcaaaggcttctaccccagcgacatcgccgtggagtgggagagcaatgggcagccggagaacaactacaagaccacgcctcccgtgctggactccgacggctccttcttcctctacagcaggctaaccgtggacaagagcaggtggcaggaggggaatgtcttctcatgctccgtgatgcatgaggctctgcacaaccactacacacagaagagcctctccctgtctctgggtaaagctagtcagacccccaccaacaccatcagcgtgacccccaccaacaacagcacccccaccaacaacagcaaccccaagcccaaccccgctagcatggccaccacccttcccgttcagcgccacccgcggtccctcttccccgagttttctgagctgttcgcggccttcccgtcattcgccggactccggcccaccttcgacacccggttgatgcggctggaagacgagatgaaagaggggcgctacgaggtacgcgcggagcttcccggggtcgaccccgacaaggacgtcgacattatggtccgcgatggtcagctgaccatcaaggccgagcgcaccgagcagaaggacttcgacggtcgctcggaattcgcgtacggttccttcgttcgcacggtgtcgctgccggtaggtgctgacgaggacgacattaaggccacctacgacaagggcattcttactgtgtcggtggcggtttcggaagggaagccaaccgaaaagcacattcagatccggtccaccaactga

SEQ ID NO: 155 - protein, 583 aa, Artificial Sequence
  Description of Artificial Sequence: Synthetic polypeptide
QVTLKESGPGILQPSQTLSLTCSFSGFSLSTSGMGLSWIRQPSGKGLEWLAHIYWDDDKRYNPSLKSRLTISKDTSSNQVFLKITIVDTADAATYYCARSSHYYGYGYGGYFDVWGAGTTVTVSSAKTKGPSVFPLAPCSRSTSESTAALGCLVKDYFPEPVTVSWNSGALTSGVHTFPAVLQSSGLYSLSSVVTVPSSSLGTKTYTCNVDHKPSNTKVDKRVESKYGPPCPPCPAPEFEGGPSVFLFPPKPKDTLMISRTPEVTCVVVDVSQEDPEVQFNWYVDGVEVHNAKTKPREEQFNSTYRVVSVLTVLHQDWLNGKEYKCKVSNKGLPSSIEKTISKAKGQPREPQVYTLPPSQEEMTKNQVSLTCLVKGFYPSDIAVEWESNGQPENNYKTTPPVLDSDGSFFLYSRLTVDKSRWQEGNVFSCSVMHEALHNHYTQKSLSLSLGKASQTPTNTISVTPTNNSTPTNNSNPKPNPASMATTLPVQRHPRSLFPEFSELFAAFPSFAGLRPTFDTRLMRLEDEMKEGRYEVRAELPGVDPDKDVDIMVRDGQLTIKAERTEQKDFDGRSEFAYGSFVR

SEQ ID NO: 156 - DNA, 6445 bp, Artificial Sequence
  Description of Artificial Sequence: Synthetic polynucleotide
tggcgaatgggacgcgccctgtagcggcgcattaagcgcggcgggtgtggtggttacgcgcagcgtgaccgctacacttgccagcgccctagcgcccgctcctttcgctttcttcccttcctttctcgccacgttcgccggctttccccgtcaagctctaaatcgggggctccctttagggttccgatttagtgctttacggcacctcgaccccaaaaaacttgattagggtgatggttcacgtagtgggccatcgccctgatagacggtttttcgccctttgacgttggagtccacgttctttaatagtggactcttgttccaaactggaacaacactcaaccctatctcggtctattcttttgatttataagggattttgccgatttcggcctattggttaaaaaatgagctgatttaacaaaaatttaacgcgaattttaacaaaatattaacgtttacaatttcaggtggcacttttcggggaaatgtgcgcggaacccctatttgtttatttttctaaatacattcaaatatgtatccgctcatgaattaattcttagaaaaactcatcgagcatcaaatgaaactgcaatttattcatatcaggattatcaataccatatttttgaaaaagccgtttctgtaatgaaggagaaaactcaccgaggcagttccataggatggcaagatcctggtatcggtctgcgattccgactcgtccaacatcaatacaacctattaatttcccctcgtcaaaaataaggttatcaagtgagaaatcaccatgagtgacgactgaatccggtgagaatggcaaaagtttatgcatttctttccagacttgttcaacaggccagccattacgctcgtcatcaaaatcactcgcatcaaccaaaccgttattcattcgtgattgcgcctgagcgagacgaaatacgcgatcgctgttaaaaggacaattacaaacaggaatcgaatgcaaccggcgcaggaacactgccagcgcatcaacaatattttcacctgaatcaggatattcttctaatacctggaatgctgttttcccggggatcgcagtggtgagtaaccatgcatcatcaggagtacggataaaatgcttgatggtcggaagaggcataaattccgtcagccagtttagtctgaccatctcatctgtaacatcattggcaacgctacctttgccatgtttcagaaacaactctggcgcatcgggcttcccatacaatcgatagattgtcgcacctgattgcccgacattatcgcgagcccatttatacccatataaatcagcatccatgttggaatttaatcgcggcctagagcaagacgtttcccgttgaatatggctcataacaccccttgtattactgtttatgtaagcagacagttttattgttcatgaccaaaatcccttaacgtgagttttcgttccactgagcgtcagaccccgtagaaaagatcaaaggatcttcttgagatcctttttttctgcgcgtaatctgctgcttgcaaacaaaaaaaccaccgctaccagcggtggtttgtttgccggatcaagagctaccaactctttttccgaaggtaactggcttcagcagagcgcagataccaaatactgtccttctagtgtagccgtagttaggccaccacttcaagaactctgtagcaccgcctacatacctcgctctgctaatcctgttaccagtggctgctgccagtggcgataagtcgtgtcttaccgggttggactcaagacgatagttaccggataaggcgcagcggtcgggctgaacggggggttcgtgcacacagcccagcttggagcgaacgacctacaccgaactgagatacctacagcgtgagctatgagaaagcgccacgcttcccgaagggagaaaggcggacaggtatccggtaagcggcagggtcggaacaggagagcgcacgagggagcttccagggggaaacgcctggtatctttatagtcctgtcgggtttcgccacctctgacttgagcgtcgatttttgtgatgctcgtcaggggggcggagcctatggaaaaacgccagcaacgcggcctttttacggttcctggccttttgctggccttttgctcacatgttctttcctgcgttatcccctgattctgtggataaccgtattaccgcctttgagtgagctgataccgctcgccgcagccgaacgaccgagcgcagcgagtcagtgagcgaggaagcggaagagcgcctgatgcggtattttctccttacgcatctgtgcggtatttcacaccgcatatatggtgcactctcagtacaatctgctctgatgccgcatagttaagccagtatacactccgctatcgctacgtgactgggtcatggctgcgccccgacacccgccaacacccgctgacgcgccctgacgggcttgtctgctcccggcatccgcttacagacaagctgtgaccgtctccgggagctgcatgtgtcagaggttttcaccgtcatcaccgaaacgcgcgaggcagctgcggtaaagctcatcagcgtggtcgtgaagcgattcacagatgtctgcctgttcatccgcgtccagctcgttgagtttctccagaagcgttaatgtctggcttctgataaagcgggccatgttaagggcggttttttcctgtttggtcactgatgcctccgtgtaagggggatttctgttcatgggggtaatgataccgatgaaacgagagaggatgctcacgatacgggttactgatgatgaacatgcccggttactggaacgttgtgagggtaaacaactggcggtatggatgcggcgggaccagagaaaaatcactcagggtcaatgccagcgcttcgttaatacagatgtaggtgttccacagggtagccagcagcatcctgcgatgcagatccggaacataatggtgcagggcgctgacttccgcgtttccagactttacgaaacacggaaaccgaagaccattcatgttgttgctcaggtcgcagacgttttgcagcagcagtcgcttcacgttcgctcgcgtatcggtgattcattctgctaaccagtaaggcaaccccgccagcctagccgggtcctcaacgacaggagcacgatcatgcgcacccgtggggccgccatgccggcgataatggcctgcttctcgccgaaacgtttggtggcgggaccagtgacgaaggcttgagcgagggcgtgcaagattccgaataccgcaagcgacaggccgatcatcgtcgcgctccagcgaaagcggtcctcgccgaaaatgacccagagcgctgccggcacctgtcctacgagttgcatgataaagaagacagtcataagtgcggcgacgatagtcatgccccgcgcccaccggaaggagctgactgggttgaaggctctcaagggcatcggtcgagatcccggtgcctaatgagtgagctaacttacattaattgcgttgcgctcactgcccgctttccagtcgggaaacctgtcgtgccagctgcattaatgaatcggccaacgcgcggggagaggcggtttgcgtattgggcgccagggtggtttttcttttcaccagtgagacgggcaacagctgattgcccttcaccgcctggccctgagagagttgcagcaagcggtccacgctggtttgccccagcaggcgaaaatcctgtttgatggtggttaacggcgggatataacatgagctgtcttcggtatcgtcgtatcccactaccgagatatccgcaccaacgcgcagcccggactcggtaatggcgcgcattgcgcccagcgccatctgatcgttggcaaccagcatcgcagtgggaacgatgccctcattcagcatttgcatggtttgttgaaaaccggacatggcactccagtcgccttcccgttccgctatcggctgaatttgattgcgagtgagatatttatgccagccagccagacgcagacgcgccgagacagaacttaatgggcccgctaacagcgcgatttgctggtgacccaatgcgaccagatgctccacgcccagtcgcgtaccgtcttcatgggagaaaataatactgttgatgggtgtctggtcagagacatcaagaaataacgccggaacattagtgcaggcagcttccacagcaatggcatcctggtcatccagcggatagttaatgatcagcccactgacgcgttgcgcgagaagattgtgcaccgccgctttacaggcttcgacgccgcttcgttctaccatcgacaccaccacgctggcacccagttgatcggcgcgagatttaatcgccgcgacaatttgcgacggcgcgtgcagggccagactggaggtggcaacgccaatcagcaacgactgtttgcccgccagttgttgtgccacgcggttgggaatgtaattcagctccgccatcgccgcttccactttttcccgcgttttcgcagaaacgtggctggcctggttcaccacgcgggaaacggtctgataagagacaccggcatactctgcgacatcgtataacgttactggtttcacattcaccaccctgaattgactctcttccgggcgctatcatgccataccgcgaaaggttttgcgccattcgatggtgtccgggatctcgacgctctcccttatgcgactcctgcattaggaagcagcccagtagtaggttgaggccgttgagcaccgccgccgcaaggaatggtgcatgcaaggagatggcgcccaacagtcccccggccacggggcctgccaccatacccacgccgaaacaagcgctcatgagcccgaagtggcgagcccgatcttccccatcggtgatgtcggcgatataggcgccagcaaccgcacctgtggcgccggtgatgccggccacgatgcgtccggcgtagaggatcgagatctcgatcccgcgaaattaatacgactcactataggggaattgtgagcggataacaattcccctctagaaataattttgtttaactttaagaaggagatataccatgggcagcagccatcatcatcatcatcacagcagcggcctggtgccgcgcggcagccatatggctagtatggatctggatgcagtaaggattaaagtggacacagtaaatgcaaaaccgggagacacagtaaatatacctgtaagattcagtggtataccatccaagggaatagcaaactgtgactttgtatacagctatgacccgaatgtacttgagataatagagataaaaccgggagaattgatagttgacccgaatcctaccaagagctttgatactgcagtatatcctgacagaaagatgatagtattcctgtttgcggaagacagcggaacaggagcgtatgcaataactaaagacggagtatttgctacgatagtagcgaaagtaaaagaaggagcacctaacgggctcagtgtaatcaaatttgtagaagtaggcggatttgcgaacaatgaccttgtagaacagaagacacagttctttgacggtggagtaaatgttggagatacaacagaacctgcaacacctacaacacctgtaacaacaccgacaacaacagatgatctagatgcagctagcatgaccggccccaccaccgacgccgatgccgctgtcccacgtcgggtcttgatcgcggaagatgaagcgctcatccgcatggacctggccgagatgttgcgagaggagggatatgaaattgtcggcgaggccggcgacggccaggaagccgtcgagctggccgagctgcacaagcccgacctggtgatcatggacgtgaagatgccgcgccgggacgggatcgacgccgcatccgaaatcgccagcaaacgtattgccccgatcgtggtgctgaccgcgttcagccagcgtgatctggtcgaacgtgcgcgtgatgccggggcgatggcatacctggtaaagcctttcagcatcagcgacctgattccagcgattgaattggcggtcagccggttcagggagatcaccgcgttggaaggcgaggtggcgacgctatctgaacggttggaaacccgcaagctggtggaacgagcaaaaggcctgctgcagaccaaacatgggatgaccgagccggacgctttcaagtggattcaacgtgccgccatggatcggcgcaccaccatgaagcgggtggccgaagtcgtgctggaaaccctcggaacacccaaagacacctgagcggccgcactcgagcaccaccaccaccaccactgagatccggctgctaacaaagcccgaaaggaagctgagttggctgctgccaccgctgagcaataactagcataaccccttggggcctctaaacgggtcttgaggggttttttgctgaaaggaggaactatatccggat

SEQ ID NO: 157 - protein, 400 aa, Artificial Sequence
  Description of Artificial Sequence: Synthetic polypeptide
MGSSHHHHHHSSGLVPRGSHMASMDLDAVRIKVDTVNAKPGDTVNIPVRFSGIPSKGIANCDFVYSYDPNVLEIIEIKPGELIVDPNPTKSFDTAVYPDRKMIVFLFAEDSGTGAYAITKDGVFATIVAKVKEGAPNGLSVIKFVEVGGFANNDLVEQKTQFFDGGVNVGDTTEPATPTTPVTTPTTTDDLDAASMTGPTTDADAAVPRRVLIAEDEALIRMDLAEMLREEGYEIVGEAGDGQEAVELAELHKPDLVIMDVKMPRRDGIDAASEIASKRIAPIVVLTAFSQRDLVERARDAGAMAYLVKPFSISDLIPAIELAVSRFREITALEGEVATLSERLETRKLVERAKGLLQTKHGMTEPDAFKWIQRAAMDRRTTMKRVAEVVLETLGTPKDT

SEQ ID NO: 158 - DNA, 6913 bp, Artificial Sequence
  Description of Artificial Sequence: Synthetic polynucleotide
tggcgaatgggacgcgccctgtagcggcgcattaagcgcggcgggtgtggtggttacgcgcagcgtgaccgctacacttgccagcgccctagcgcccgctcctttcgctttcttcccttcctttctcgccacgttcgccggctttccccgtcaagctctaaatcgggggctccctttagggttccgatttagtgctttacggcacctcgaccccaaaaaacttgattagggtgatggttcacgtagtgggccatcgccctgatagacggtttttcgccctttgacgttggagtccacgttctttaatagtggactcttgttccaaactggaacaacactcaaccctatctcggtctattcttttgatttataagggattttgccgatttcggcctattggttaaaaaatgagctgatttaacaaaaatttaacgcgaattttaacaaaatattaacgtttacaatttcaggtggcacttttcggggaaatgtgcgcggaacccctatttgtttatttttctaaatacattcaaatatgtatccgctcatgaattaattcttagaaaaactcatcgagcatcaaatgaaactgcaatttattcatatcaggattatcaataccatatttttgaaaaagccgtttctgtaatgaaggagaaaactcaccgaggcagttccataggatggcaagatcctggtatcggtctgcgattccgactcgtccaacatcaatacaacctattaatttcccctcgtcaaaaataaggttatcaagtgagaaatcaccatgagtgacgactgaatccggtgagaatggcaaaagtttatgcatttctttccagacttgttcaacaggccagccattacgctcgtcatcaaaatcactcgcatcaaccaaaccgttattcattcgtgattgcgcctgagcgagacgaaatacgcgatcgctgttaaaaggacaattacaaacaggaatcgaatgcaaccggcgcaggaacactgccagcgcatcaacaatattttcacctgaatcaggatattcttctaatacctggaatgctgttttcccggggatcgcagtggtgagtaaccatgcatcatcaggagtacggataaaatgcttgatggtcggaagaggcataaattccgtcagccagtttagtctgaccatctcatctgtaacatcattggcaacgctacctttgccatgtttcagaaacaactctggcgcatcgggcttcccatacaatcgatagattgtcgcacctgattgcccgacattatcgcgagcccatttatacccatataaatcagcatccatgttggaatttaatcgcggcctagagcaagacgtttcccgttgaatatggctcataacaccccttgtattactgtttatgtaagcagacagttttattgttcatgaccaaaatcccttaacgtgagttttcgttccactgagcgtcagaccccgtagaaaagatcaaaggatcttcttgagatcctttttttctgcgcgtaatctgctgcttgcaaacaaaaaaaccaccgctaccagcggtggtttgtttgccggatcaagagctaccaactctttttccgaaggtaactggcttcagcagagcgcagataccaaatactgtccttctagtgtagccgtagttaggccaccacttcaagaactctgtagcaccgcctacatacctcgctctgctaatcctgttaccagtggctgctgccagtggcgataagtcgtgtcttaccgggttggactcaagacgatagttaccggataaggcgcagcggtcgggctgaacggggggttcgtgcacacagcccagcttggagcgaacgacctacaccgaactgagatacctacagcgtgagctatgagaaagcgccacgcttcccgaagggagaaaggcggacaggtatccggtaagcggcagggtcggaacaggagagcgcacgagggagcttccagggggaaacgcctggtatctttatagtcctgtcgggtttcgccacctctgacttgagcgtcgatttttgtgatgctcgtcaggggggcggagcctatggaaaaacgccagcaacgcggcctttttacggttcctggccttttgctggccttttgctcacatgttctttcctgcgttatcccctgattctgtggataaccgtattaccgcctttgagtgagctgataccgctcgccgcagccgaacgaccgagcgcagcgagtcagtgagcgaggaagcggaagagcgcctgatgcggtattttctccttacgcatctgtgcggtatttcacaccgcatatatggtgcactctcagtacaatctgctctgatgccgcatagttaagccagtatacactccgctatcgctacgtgactgggtcatggctgcgccccgacacccgccaacacccgctgacgcgccctgacgggcttgtctgctcccggcatccgcttacagacaagctgtgaccgtctccgggagctgcatgtgtcagaggttttcaccgtcatcaccgaaacgcgcgaggcagctgcggtaaagctcatcagcgtggtcgtgaagcgattcacagatgtctgcctgttcatccgcgtccagctcgttgagtttctccagaagcgttaatgtctggcttctgataaagcgggccatgttaagggcggttttttcctgtttggtcactgatgcctccgtgtaagggggatttctgttcatgggggtaatgataccgatgaaacgagagaggatgctcacgatacgggttactgatgatgaacatgcccggttactggaacgttgtgagggtaaacaactggcggtatggatgcggcgggaccagagaaaaatcactcagggtcaatgccagcgcttcgttaatacagatgtaggtgttccacagggtagccagcagcatcctgcgatgcagatccggaacataatggtgcagggcgctgacttccgcgtttccagactttacgaaacacggaaaccgaagaccattcatgttgttgctcaggtcgcagacgttttgcagcagcagtcgcttcacgttcgctcgcgtatcggtgattcattctgctaaccagtaaggcaaccccgccagcctagccgggtcctcaacgacaggagcacgatcatgcgcacccgtggggccgccatgccggcgataatggcctgcttctcgccgaaacgtttggtggcgggaccagtgacgaaggcttgagcgagggcgtgcaagattccgaataccgcaagcgacaggccgatcatcgtcgcgctccagcgaaagcggtcctcgccgaaaatgacccagagcgctgccggcacctgtcctacgagttgcatgataaagaagacagtcataagtgcggcgacgatagtcatgccccgcgcccaccggaaggagctgactgggttgaaggctctcaagggcatcggtcgagatcccggtgcctaatgagtgagctaacttacattaattgcgttgcgctcactgcccgctttccagtcgggaaacctgtcgtgccagctgcattaatgaatcggccaacgcgcggggagaggcggtttgcgtattgggcgccagggtggtttttcttttcaccagtgagacgggcaacagctgattgcccttcaccgcctggccctgagagagttgcagcaagcggtccacgctggtttgccccagcaggcgaaaatcctgtttgatggtggttaacggcgggatataacatgagctgtcttcggtatcgtcgtatcccactaccgagatatccgcaccaacgcgcagcccggactcggtaatggcgcgcattgcgcccagcgccatctgatcgttggcaaccagcatcgcagtgggaacgatgccctcattcagcatttgcatggtttgttgaaaaccggacatggcactccagtcgccttcccgttccgctatcggctgaatttgattgcgagtgagatatttatgccagccagccagacgcagacgcgccgagacagaacttaatgggcccgctaacagcgcgatttgctggtgacccaatgcgaccagatgctccacgcccagtcgcgtaccgtcttcatgggagaaaataatactgttgatgggtgtctggtcagagacatcaagaaataacgccggaacattagtgcaggcagcttccacagcaatggcatcctggtcatccagcggatagttaatgatcagcccactgacgcgttgcgcgagaagattgtgcaccgccgctttacaggcttcgacgccgcttcgttctaccatcgacaccaccacgctggcacccagttgatcggcgcgagatttaatcgccgcgacaatttgcgacggcgcgtgcagggccagactggaggtggcaacgccaatcagcaacgactgtttgcccgccagttgttgtgccacgcggttgggaatgtaattcagctccgccatcgccgcttccactttttcccgcgttttcgcagaaacgtggctggcctggttcaccacgcgggaaacggtctgataagagacaccggcatactctgcgacatcgtataacgttactggtttcacattcaccaccctgaattgactctcttccgggcgctatcatgccataccgcgaaaggttttgcgccattcgatggtgtccgggatctcgacgctctcccttatgcgactcctgcattaggaagcagcccagtagtaggttgaggccgttgagcaccgccgccgcaaggaatggtgcatgcaaggagatggcgcccaacagtcccccggccacggggcctgccaccatacccacgccgaaacaagcgctcatgagcccgaagtggcgagcccgatcttccccatcggtgatgtcggcgatataggcgccagcaaccgcacctgtggcgccggtgatgccggccacgatgcgtccggcgtagaggatcgagatctcgatcccgcgaaattaatacgactcactataggggaattgtgagcggataacaattcccctctagaaataattttgtttaactttaagaaggagatataccatgggcagcagccatcatcatcatcatcacagcagcggcctggtgccgcgcggcagccatatggctagtatggatctggatgcagtaaggattaaagtggacacagtaaatgcaaaaccgggagacacagtaaatatacctgtaagattcagtggtataccatccaagggaatagcaaactgtgactttgtatacagctatgacccgaatgtacttgagataatagagataaaaccgggagaattgatagttgacccgaatcctaccaagagctttgatactgcagtatatcctgacagaaagatgatagtattcctgtttgcggaagacagcggaacaggagcgtatgcaataactaaagacggagtatttgctacgatagtagcgaaagtaaaagaaggagcacctaacgggctcagtgtaatcaaatttgtagaagtaggcggatttgcgaacaatgaccttgtagaacagaagacacagttctttgacggtggagtaaatgttggagatacaacagaacctgcaacacctacaacacctgtaacaacaccgacaacaacagatgatctagatgcagctagcatgcgatccactgttgctgtcgccgtagcggcagccgtgatcgcagcgtccagtggttgcggctccgatcaaccggcccataaggcgtcacaatcgatgatcacgcccaccacccagatcgccggcgccggggtgctgggaaacgacagaaagccggatgagtcgtgcgcgcgtgcggcggccgcggccgatccggggccaccgacccgaccagcgcacaatgcggcgggagtcagcccggagatggtgcaggtgccggcggaggcgcagcgcatcgtggtgctctccggtgaccagctcgacgcgctgtgcgcgctgggcctgcaatcgcggatcgtcgccgccgcgttgccgaacagctcctcaagtcaaccttcctatctgggcacgaccgtgcatgatctgcccggtgtcggtactcgcagcgcccccgacctgcgcgccattgcggcggctcacccggatctgatcctgggttcgcagggtttgacgccgcagttgtatccgcagctggcggcgatcgccccgacggtgtttaccgcggcaccgggcgcggactgggaaaataacctgcgtggtgtcggtgccgccacggcccgtatcgccgcggtggacgcgctgatcaccgggttcgccgaacacgccacccaggtcgggaccaagcatgacgcgacccacttccaagcgtcgatcgtgcagctgaccgccaacaccatgcgggtatacggcgccaacaacttcccggccagcgtgctgagcgcggtcggcgtcgaccgaccgccgtctcaacggttcaccgacaaggcctacatcgagatcggcaccacggccgccgacctggcgaaatcaccggacttctcggcggccgacgccgatatcgtctacctgtcgtgcgcgtcggaagcagccgcggaacgcgcggccgtcatcctggatagcgacccatggcgcaagctgtccgccaaccgtgacaaccgggtcttcgtcgtcaacgaccaggtatggcagaccggcgagggtatggtcgctgcccgcggcattgtcgatgatctgcgctgggtcgacgcgccgatcaactagaagcttgcggccgcactcgagcaccaccaccaccaccactgagatccggctgctaacaaagcccgaaaggaagctgagttggctgctgccaccgctgagcaataactagcataaccccttggggcctctaaacgggtcttgaggggttttttgctgaaaggaggaactatatccggat

SEQ ID NO: 159 - protein, 554 aa, Artificial Sequence
  Description of Artificial Sequence: Synthetic polypeptide
MGSSHHHHHHSSGLVPRGSHMASMDLDAVRIKVDTVNAKPGDTVNIPVRFSGIPSKGIANCDFVYSYDPNVLEIIEIKPGELIVDPNPTKSFDTAVYPDRKMIVFLFAEDSGTGAYAITKDGVFATIVAKVKEGAPNGLSVIKFVEVGGFANNDLVEQKTQFFDGGVNVGDTTEPATPTTPVTTPTTTDDLDAASMRSTVAVAVAAAVIAASSGCGSDQPAHKASQSMITPTTQIAGAGVLGNDRKPDESCARAAAAADPGPPTRPAHNAAGVSPEMVQVPAEAQRIVVLSGDQLDALCALGLQSRIVAAALPNSSSSQPSYLGTTVHDLPGVGTRSAPDLRAIAAAHPDLILGSQGLTPQLYPQLAAIAPTVFTAAPGADWENNLRGVGAATARIAAVDALITGFAEHATQVGTKHDATHFQASIVQLTANTMRVYGANNFPASVLSAVGVDRPPSQRFTDKAYIEIGTTAADLAKSPDFSAADADIVYLSCASEAAAERAAVILDSDPWRKLSANRDNRVFVVNDQVWQTGEGMVAARGIVDDLRWVDAPIN

SEQ ID NO: 160 - DNA, 6844 bp, Artificial Sequence
  Description of Artificial Sequence: Synthetic polynucleotide
tggcgaatgggacgcgccctgtagcggcgcattaagcgcggcgggtgtggtggttacgcgcagcgtgaccgctacacttgccagcgccctagcgcccgctcctttcgctttcttcccttcctttctcgccacgttcgccggctttccccgtcaagctctaaatcgggggctccctttagggttccgatttagtgctttacggcacctcgaccccaaaaaacttgattagggtgatggttcacgtagtgggccatcgccctgatagacggtttttcgccctttgacgttggagtccacgttctttaatagtggactcttgttccaaactggaacaacactcaaccctatctcggtctattcttttgatttataagggattttgccgatttcggcctattggttaaaaaatgagctgatttaacaaaaatttaacgcgaattttaacaaaatattaacgtttacaatttcaggtggcacttttcggggaaatgtgcgcggaacccctatttgtttatttttctaaatacattcaaatatgtatccgctcatgaattaattcttagaaaaactcatcgagcatcaaatgaaactgcaatttattcatatcaggattatcaataccatatttttgaaaaagccgtttctgtaatgaaggagaaaactcaccgaggcagttccataggatggcaagatcctggtatcggtctgcgattccgactcgtccaacatcaatacaacctattaatttcccctcgtcaaaaataaggttatcaagtgagaaatcaccatgagtgacgactgaatccggtgagaatggcaaaagtttatgcatttctttccagacttgttcaacaggccagccattacgctcgtcatcaaaatcactcgcatcaaccaaaccgttattcattcgtgattgcgcctgagcgagacgaaatacgcgatcgctgttaaaaggacaattacaaacaggaatcgaatgcaaccggcgcaggaacactgccagcgcatcaacaatattttcacctgaatcaggatattcttctaatacctggaatgctgttttcccggggatcgcagtggtgagtaaccatgcatcatcaggagtacggataaaatgcttgatggtcggaagaggcataaattccgtcagccagtttagtctgaccatctcatctgtaacatcattggcaacgctacctttgccatgtttcagaaacaactctggcgcatcgggcttcccatacaatcgatagattgtcgcacctgattgcccgacattatcgcgagcccatttatacccatataaatcagcatccatgttggaatttaatcgcggcctagagcaagacgtttcccgttgaatatggctcataacaccccttgtattactgtttatgtaagcagacagttttattgttcatgaccaaaatcccttaacgtgagttttcgttccactgagcgtcagaccccgtagaaaagatcaaaggatcttcttgagatcctttttttctgcgcgtaatctgctgcttgcaaacaaaaaaaccaccgctaccagcggtggtttgtttgccggatcaagagctaccaactctttttccgaaggtaactggcttcagcagagcgcagataccaaatactgtccttctagtgtagccgtagttaggccaccacttcaagaactctgtagcaccgcctacatacctcgctctgctaatcctgttaccagtggctgctgccagtggcgataagtcgtgtcttaccgggttggactcaagacgatagttaccggataaggcgcagcggtcgggctgaacggggggttcgtgcacacagcccagcttggagcgaacgacctacaccgaactgagatacctacagcgtgagctatgagaaagcgccacgcttcccgaagggagaaaggcggacaggtatccggtaagcggcagggtcggaacaggagagcgcacgagggagcttccagggggaaacgcctggtatctttatagtcctgtcgggtttcgccacctctgacttgagcgtcgatttttgtgatgctcgtcaggggggcggagcctatggaaaaacgccagcaacgcggcctttttacggttcctggccttttgctggccttttgctcacatgttctttcctgcgttatcccctgattctgtggataaccgtattaccgcctttgagtgagctgataccgctcgccgcagccgaacgaccgagcgcagcgagtcagtgagcgaggaagcggaagagcgcctgatgcggtattttctccttacgcatctgtgcggtatttcacaccgcatatatggtgcactctcagtacaatctgctctgatgccgcatagttaagccagtatacactccgctatcgctacgtgactgggtcatggctgcgccccgacacccgccaacacccgctgacgcgccctgacgggcttgtctgctcccggcatccgcttacagacaagctgtgaccgtctccgggagctgcatgtgtcagaggttttcaccgtcatcaccgaaacgcgcgaggcagctgcggtaaagctcatcagcgtggtcgtgaagcgattcacagatgtctgcctgttcatccgcgtccagctcgttgagtttctccagaagcgttaatgtctggcttctgataaagcgggccatgttaagggcggttttttcctgtttggtcactgatgcctccgtgtaagggggatttctgttcatgggggtaatgataccgatgaaacgagagaggatgctcacgatacgggttactgatgatgaacatgcccggttactggaacgttgtgagggtaaacaactggcggtatggatgcggcgggaccagagaaaaatcactcagggtcaatgccagcgcttcgttaatacagatgtaggtgttccacagggtagccagcagcatcctgcgatgcagatccggaacataatggtgcagggcgctgacttccgcgtttccagactttacgaaacacggaaaccgaagaccattcatgttgttgctcaggtcgcagacgttttgcagcagcagtcgcttcacgttcgctcgcgtatcggtgattcattctgctaaccagtaaggcaaccccgccagcctagccgggtcctcaacgacaggagcacgatcatgcgcacccgtggggccgccatgccggcgataatggcctgcttctcgccgaaacgtttggtggcgggaccagtgacgaaggcttgagcgagggcgtgcaagattccgaataccgcaagcgacaggccgatcatcgtcgcgctccagcgaaagcggtcctcgccgaaaatgacccagagcgctgccggcacctgtcctacgagttgcatgataaagaagacagtcataagtgcggcgacgatagtcatgccccgcgcccaccggaaggagctgactgggttgaaggctctcaagggcatcggtcgagatcccggtgcctaatgagtgagctaacttacattaattgcgttgcgctcactgcccgctttccagtcgggaaacctgtcgtgccagctgcattaatgaatcggccaacgcgcggggagaggcggtttgcgtattgggcgccagggtggtttttcttttcaccagtgagacgggcaacagctgattgcccttcaccgcctggccctgagagagttgcagcaagcggtccacgctggtttgccccagcaggcgaaaatcctgtttgatggtggttaacggcgggatataacatgagctgtcttcggtatcgtcgtatcccactaccgagatatccgcaccaacgcgcagcccggactcggtaatggcgcgcattgcgcccagcgccatctgatcgttggcaaccagcatcgcagtgggaacgatgccctcattcagcatttgcatggtttgttgaaaaccggacatggcactccagtcgccttcccgttccgctatcggctgaatttgattgcgagtgagatatttatgccagccagccagacgcagacgcgccgagacagaacttaatgggcccgctaacagcgcgatttgctggtgacccaatgcgaccagatgctccacgcccagtcgcgtaccgtcttcatgggagaaaataatactgttgatgggtgtctggtcagagacatcaagaaataacgccggaacattagtgcaggcagcttccacagcaatggcatcctggtcatccagcggatagttaatgatcagcccactgacgcgttgcgcgagaagattgtgcaccgccgctttacaggcttcgacgccgcttcgttctaccatcgacaccaccacgctggcacccagttgatcggcgcgagatttaatcgccgcgacaatttgcgacggcgcgtgcagggccagactggaggtggcaacgccaatcagcaacgactgtttgcccgccagttgttgtgccacgcggttgggaatgtaattcagctccgccatcgccgcttccactttttcccgcgttttcgcagaaacgtggctggcctggttcaccacgcgggaaacggtctgataagagacaccggcatactctgcgacatcgtataacgttactggtttcacattcaccaccctgaattgactctcttccgggcgctatcatgccataccgcgaaaggttttgcgccattcgatggtgtccgggatctcgacgctctcccttatgcgactcctgcattaggaagcagcccagtagtaggttgaggccgttgagcaccgccgccgcaaggaatggtgcatgcaaggagatggcgcccaacagtcccccggccacggggcctgccaccatacccacgccgaaacaagcgctcatgagcccgaagtggcgagcccgatcttccccatcggtgatgtcggcgatataggcgccagcaaccgcacctgtggcgccggtgatgccggccacgatgcgtccggcgtagaggatcgagatctcgatcccgcgaaattaatacgactcactataggggaattgtgagcggataacaattcccctctagaaataattttgtttaactttaagaaggagatataccatgggcagcagccatcatcatcatcatcacagcagcggcctggtgccgcgcggcagccatatggctagtatggatctggatgcagtaaggattaaagtggacacagtaaatgcaaaaccgggagacacagtaaatatacctgtaagattcagtggtataccatccaagggaatagcaaactgtgactttgtatacagctatgacccgaatgtacttgagataatagagataaaaccgggagaattgatagttgacccgaatcctaccaagagctttgatactgcagtatatcctgacagaaagatgatagtattcctgtttgcggaagacagcggaacaggagcgtatgcaataactaaagacggagtatttgctacgatagtagcgaaagtaaaagaaggagcacctaacgggctcagtgtaatcaaatttgtagaagtaggcggatttgcgaacaatgaccttgtagaacagaagacacagttctttgacggtggagtaaatgttggagatacaacagaacctgcaacacctacaacacctgtaacaacaccgacaacaacagatgatctagatgcagctagcatgcagcttgttgacagggttcgtggcgccgtcacgggtatgtcgcgtcgactcgtggtcggggccgtcggcgcggccctagtgtcgggtctggtcggcgccgtcggtggcacggcgaccgcgggggcattttcccggccgggcttgccggtggagtacctgcaggtgccgtcgccgtcgatgggccgtgacatcaaggtccaattccaaagtggtggtgccaactcgcccgccctgtacctgctcgacggcctgcgcgcgcaggacgacttcagcggctgggacatcaacaccccggcgttcgagtggtacgaccagtcgggcctgtcggtggtcatgccggtgggtggccagtcaagcttctactccgactggtaccagcccgcctgcggcaaggccggttgccagacttacaagtgggagaccttcctgaccagcgagctgccggggtggctgcaggccaacaggcacgtcaagcccaccggaagcgccgtcgtcggtctttcgatggctgcttcttcggcgctgacgctggcgatctatcacccccagcagttcgtctacgcgggagcgatgtcgggcctgttggacccctcccaggcgatgggtcccaccctgatcggcctggcgatgggtgacgctggcggctacaaggcctccgacatgtggggcccgaaggaggacccggcgtggcagcgcaacgacccgctgttgaacgtcgggaagctgatcgccaacaacacccgcgtctgggtgtactgcggcaacggcaagccgtcggatctgggtggcaacaacctgccggccaagttcctcgagggcttcgtgcggaccagcaacatcaagttccaagacgcctacaacgccggtggcggccacaacggcgtgttcgacttcccggacagcggtacgcacagctgggagtactggggcgcgcagctcaacgctatgaagcccgacctgcaacgggcactgggtgccacgcccaacaccgggcccgcgccccagggcgcctaggcggccgcactcgagcaccaccaccaccaccactgagatccggctgctaacaaagcccgaaaggaagctgagttggctgctgccaccgctgagcaataactagcataaccccttggggcctctaaacgggtcttgaggggttttttgctgaaaggaggaactatatccggat

SEQ ID NO: 161 - protein, 533 aa, Artificial Sequence
  Description of Artificial Sequence: Synthetic polypeptide
MGSSHHHHHHSSGLVPRGSHMASMDLDAVRIKVDTVNAKPGDTVNIPVRFSGIPSKGIANCDFVYSYDPNVLEIIEIKPGELIVDPNPTKSFDTAVYPDRKMIVFLFAEDSGTGAYAITKDGVFATIVAKVKEGAPNGLSVIKFVEVGGFANNDLVEQKTQFFDGGVNVGDTTEPATPTTPVTTPTTTDDLDAASMQLVDRVRGAVTGMSRRLVVGAVGAALVSGLVGAVGGTATAGAFSRPGLPVEYLQVPSPSMGRDIKVQFQSGGANSPALYLLDGLRAQDDFSGWDINTPAFEWYDQSGLSVVMPVGGQSSFYSDWYQPACGKAGCQTYKWETFLTSELPGWLQANRHVKPTGSAVVGLSMAASSALTLAIYHPQQFVYAGAMSGLLDPSQAMGPTLIGLAMGDAGGYKASDMWGPKEDPAWQRNDPLLNVGKLIANNTRVWVYCGNGKPSDLGGNNLPAKFLEGFVRTSNIKFQDAYNAGGGHNGVFDFPDSGTHSWEYWGAQLNAMKPDLQRALGATPNTGPAPQGA

SEQ ID NO: 162 - DNA, 6811 bp, Artificial Sequence
  Description of Artificial Sequence: Synthetic polynucleotide
tggcgaatgggacgcgccctgtagcggcgcattaagcgcggcgggtgtggtggttacgcgcagcgtgaccgctacacttgccagcgccctagcgcccgctcctttcgctttcttcccttcctttctcgccacgttcgccggctttccccgtcaagctctaaatcgggggctccctttagggttccgatttagtgctttacggcacctcgaccccaaaaaacttgattagggtgatggttcacgtagtgggccatcgccctgatagacggtttttcgccctttgacgttggagtccacgttctttaatagtggactcttgttccaaactggaacaacactcaaccctatctcggtctattcttttgatttataagggattttgccgatttcggcctattggttaaaaaatgagctgatttaacaaaaatttaacgcgaattttaacaaaatattaacgtttacaatttcaggtggcacttttcggggaaatgtgcgcggaacccctatttgtttatttttctaaatacattcaaatatgtatccgctcatgaattaattcttagaaaaactcatcgagcatcaaatgaaactgcaatttattcatatcaggattatcaataccatatttttgaaaaagccgtttctgtaatgaaggagaaaactcaccgaggcagttccataggatggcaagatcctggtatcggtctgcgattccgactcgtccaacatcaatacaacctattaatttcccctcgtcaaaaataaggttatcaagtgagaaatcaccatgagtgacgactgaatccggtgagaatggcaaaagtttatgcatttctttccagacttgttcaacaggccagccattacgctcgtcatcaaaatcactcgcatcaaccaaaccgttattcattcgtgattgcgcctgagcgagacgaaatacgcgatcgctgttaaaaggacaattacaaacaggaatcgaatgcaaccggcgcaggaacactgccagcgcatcaacaatattttcacctgaatcaggatattcttctaatacctggaatgctgttttcccggggatcgcagtggtgagtaaccatgcatcatcaggagtacggataaaatgcttgatggtcggaagaggcataaattccgtcagccagtttagtctgaccatctcatctgtaacatcattggcaacgctacctttgccatgtttcagaaacaactctggcgcatcgggcttcccatacaatcgatagattgtcgcacctgattgcccgacattatcgcgagcccatttatacccatataaatcagcatccatgttggaatttaatcgcggcctagagcaagacgtttcccgttgaatatggctcataacaccccttgtattactgtttatgtaagcagacagttttattgttcatgaccaaaatcccttaacgtgagttttcgttccactgagcgtcagaccccgtagaaaagatcaaaggatcttcttgagatcctttttttctgcgcgtaatctgctgcttgcaaacaaaaaaaccaccgctaccagcggtggtttgtttgccggatcaagagctaccaactctttttccgaaggtaactggcttcagcagagcgcagataccaaatactgtccttctagtgtagccgtagttaggccaccacttcaagaactctgtagcaccgcctacatacctcgctctgctaatcctgttaccagtggctgctgccagtggcgataagtcgtgtcttaccgggttggactcaagacgatagttaccggataaggcgcagcggtcgggctgaacggggggttcgtgcacacagcccagcttggagcgaacgacctacaccgaactgagatacctacagcgtgagctatgagaaagcgccacgcttcccgaagggagaaaggcggacaggtatccggtaagcggcagggtcggaacaggagagcgcacgagggagcttccagggggaaacgcctggtatctttatagtcctgtcgggtttcgccacctctgacttgagcgtcgatttttgtgatgctcgtcaggggggcggagcctatggaaaaacgccagcaacgcggcctttttacggttcctggccttttgctggccttttgctcacatgttctttcctgcgttatcccctgattctgtggataaccgtattaccgcctttgagtgagctgataccgctcgccgcagccgaacgaccgagcgcagcgagtcagtgagcgaggaagcggaagagcgcctgatgcggtattttctccttacgcatctgtgcggtatttcacaccgcatatatggtgcactctcagtacaatctgctctgatgccgcatagttaagccagtatacactccgctatcgctacgtgactgggtcatggctgcgccccgacacccgccaacacccgctgacgcgccctgacgggcttgtctgctcccggcatccgcttacagacaagctgtgaccgtctccgggagctgcatgtgtcagaggttttcaccgtcatcaccgaaacgcgcgaggcagctgcggtaaagctcatcagcgtggtcgtgaagcgattcacagatgtctgcctgttcatccgcgtccagctcgttgagtttctccagaagcgttaatgtctggcttctgataaagcgggccatgttaagggcggttttttcctgtttggtcactgatgcctccgtgtaagggggatttctgttcatgggggtaatgataccgatgaaacgagagaggatgctcacgatacgggttactgatgatgaacatgcccggttactggaacgttgtgagggtaaacaactggcggtatggatgcggcgggaccagagaaaaatcactcagggtcaatgccagcgcttcgttaatacagatgtaggtgttccacagggtagccagcagcatcctgcgatgcagatccggaacataatggtgcagggcgctgacttccgcgtttccagactttacgaaacacggaaaccgaagaccattcatgttgttgctcaggtcgcagacgttttgcagcagcagtcgcttcacgttcgctcgcgtatcggtgattcattctgctaaccagtaaggcaaccccgccagcctagccgggtcctcaacgacaggagcacgatcatgcgcacccgtggggccgccatgccggcgataatggcctgcttctcgccgaaacgtttggtggcgggaccagtgacgaaggcttgagcgagggcgtgcaagattccgaataccgcaagcgacaggccgatcatcgtcgcgctccagcgaaagcggtcctcgccgaaaatgacccagagcgctgccggcacctgtcctacgagttgcatgataaagaagacagtcataagtgcggcgacgatagtcatgccccgcgcccaccggaaggagctgactgggttgaaggctctcaagggcatcggtcgagatcccggtgcctaatgagtgagctaacttacattaattgcgttgcgctcactgcccgctttccagtcgggaaacctgtcgtgccagctgcattaatgaatcggccaacgcgcggggagaggcggtttgcgtattgggcgccagggtggtttttcttttcaccagtgagacgggcaacagctgattgcccttcaccgcctggccctgagagagttgcagcaagcggtccacgctggtttgccccagcaggcgaaaatcctgtttgatggtggttaacggcgggatataacatgagctgtcttcggtatcgtcgtatcccactaccgagatatccgcaccaacgcgcagcccggactcggtaatggcgcgcattgcgcccagcgccatctgatcgttggcaaccagcatcgcagtgggaacgatgccctcattcagcatttgcatggtttgttgaaaaccggacatggcactccagtcgccttcccgttccgctatcggctgaatttgattgcgagtgagatatttatgccagccagccagacgcagacgcgccgagacagaacttaatgggcccgctaacagcgcgatttgctggtgacccaatgcgaccagatgctccacgcccagtcgcgtaccgtcttcatgggagaaaataatactgttgatgggtgtctggtcagagacatcaagaaataacgccggaacattagtgcaggcagcttccacagcaatggcatcctggtcatccagcggatagttaatgatcagcccactgacgcgttgcgcgagaagattgtgcaccgccgctttacaggcttcgacgccgcttcgttctaccatcgacaccaccacgctggcacccagttgatcggcgcgagatttaatcgccgcgacaatttgcgacggcgcgtgcagggccagactggaggtggcaacgccaatcagcaacgactgtttgcccgccagttgttgtgccacgcggttgggaatgtaattcagctccgccatcgccgcttccactttttcccgcgttttcgcagaaacgtggctggcctggttcaccacgcgggaaacggtctgataagagacaccggcatactctgcgacatcgtataacgttactggtttcacattcaccaccctgaattgactctcttccgggcgctatcatgccataccgcgaaaggttttgcgccattcgatggtgtccgggatctcgacgctctcccttatgcgactcctgcattaggaagcagcccagtagtaggttgaggccgttgagcaccgccgccgcaaggaatggtgcatgcaaggagatggcgcccaacagtcccccggccacggggcctgccaccatacccacgccgaaacaagcgctcatgagcccgaagtggcgagcccgatcttccccatcggtgatgtcggcgatataggcgccagcaaccgcacctgtggcgccggtgatgccggccacgatgcgtccggcgtagaggatcgagatctcgatcccgcgaaattaatacgactcactataggggaattgtgagcggataacaattcccctctagaaataattttgtttaactttaagaaggagatataccatgggcagcagccatcatcatcatcatcacagcagcggcctggtgccgcgcggcagccatatggctagtatggatctggatgcagtaaggattaaagtggacacagtaaatgcaaaaccgggagacacagtaaatatacctgtaagattcagtggtataccatccaagggaatagcaaactgtgactttgtatacagctatgacccgaatgtacttgagataatagagataaaaccgggagaattgatagttgacccgaatcctaccaagagctttgatactgcagtatatcctgacagaaagatgatagtattcctgtttgcggaagacagcggaacaggagcgtatgcaataactaaagacggagtatttgctacgatagtagcgaaagtaaaagaaggagcacctaacgggctcagtgtaatcaaatttgtagaagtaggcggatttgcgaacaatgaccttgtagaacagaagacacagttctttgacggtggagtaaatgttggagatacaacagaacctgcaacacctacaacacctgtaacaacaccgacaacaacagatgatctagatgcagctagcatgcatcaggtggaccccaacttgacacgtcgcaagggacgattggcggcactggctatcgcggcgatggccagcgccagcctggtgaccgttgcggtgcccgcgaccgccaacgccgatccggagccagcgcccccggtacccacaacggccgcctcgccgccgtcgaccgctgcagcgccacccgcaccggcgacacctgttgcccccccaccaccggccgccgccaacacgccgaatgcccagccgggcgatcccaacgcagcacctccgccggccgacccgaacgcaccgccgccacctgtcattgccccaaacgcaccccaacctgtccggatcgacaacccggttggaggattcagcttcgcgctgcctgctggctgggtggagtctgacgccgcccacttcgactacggttcagcactcctcagcaaaaccaccggggacccgccatttcccggacagccgccgccggtggccaatgacacccgtatcgtgctcggccggctagaccaaaagctttacgccagcgccgaagccaccgactccaaggccgcggcccggttgggctcggacatgggtgagttctatatgccctacccgggcacccggatcaaccaggaaaccgtctcgctcgacgccaacggggtgtctggaagcgcgtcgtattacgaagtcaagttcagcgatccgagtaagccgaacggccagatctggacgggcgtaatcggctcgcccgcggcgaacgcaccggacgccgggccccctcagcgctggtttgtggtatggctcgggaccgccaacaacccggtggacaagggcgcggccaaggcgctggccgaatcgatccggcctttggtcgccccgccgccggcgccggcaccggctcctgcagagcccgctccggcgccggcgccggccggggaagtcgctcctaccccgacgacaccgacaccgcagcggaccttaccggccgaattctgagcggccgcactcgagcaccaccaccaccaccactgagatccggctgctaacaaagcccgaaaggaagctgagttggctgctgccaccgctgagcaataactagcataaccccttggggcctctaaacgggtcttgaggggttttttgctgaaaggaggaactatatccggat

SEQ ID NO: 163 - protein, 520 aa, Artificial Sequence
  Description of Artificial Sequence: Synthetic polypeptide
MGSSHHHHHHSSGLVPRGSHMASMDLDAVRIKVDTVNAKPGDTVNIPVRFSGIPSKGIANCDFVYSYDPNVLEIIEIKPGELIVDPNPTKSFDTAVYPDRKMIVFLFAEDSGTGAYAITKDGVFATIVAKVKEGAPNGLSVIKFVEVGGFANNDLVEQKTQFFDGGVNVGDTTEPATPTTPVTTPTTTDDLDAASMHQVDPNLTRRKGRLAALAIAAMASASLVTVAVPATANADPEPAPPVPTTAASPPSTAAAPPAPATPVAPPPPAAANTPNAQPGDPNAAPPPADPNAPPPPVIAPNAPQPVRIDNPVGGFSFALPAGWVESDAAHFDYGSALLSKTTGDPPFPGQPPPVANDTRIVLGRLDQKLYASAEATDSKAAARLGSDMGEFYMPYPGTRINQETVSLDANGVSGSASYYEVKFSDPSKPNGQIWTGVIGSPAANAPDAGPPQRWFVVWLGTANNPVDKGAAKALAESIRPLVAPPPAPAPAPAEPAPAPAPAGEVAPTPTTPTPQRTLPA

SEQ ID NO: 164 - DNA, 7333 bp, Artificial Sequence
  Description of Artificial Sequence: Synthetic polynucleotide
tggcgaatgggacgcgccctgtagcggcgcattaagcgcggcgggtgtggtggttacgcgcagcgtgaccgctacacttgccagcgccctagcgcccgctcctttcgctttcttcccttcctttctcgccacgttcgccggctttccccgtcaagctctaaatcgggggctccctttagggttccgatttagtgctttacggcacctcgaccccaaaaaacttgattagggtgatggttcacgtagtgggccatcgccctgatagacggtttttcgccctttgacgttggagtccacgttctttaatagtggactcttgttccaaactggaacaacactcaaccctatctcggtctattcttttgatttataagggattttgccgatttcggcctattggttaaaaaatgagctgatttaacaaaaatttaacgcgaattttaacaaaatattaacgtttacaatttcaggtggcacttttcggggaaatgtgcgcggaacccctatttgtttatttttctaaatacattcaaatatgtatccgctcatgaattaattcttagaaaaactcatcgagcatcaaatgaaactgcaatttattcatatcaggattatcaataccatatttttgaaaaagccgtttctgtaatgaaggagaaaactcaccgaggcagttccataggatggcaagatcctggtatcggtctgcgattccgactcgtccaacatcaatacaacctattaatttcccctcgtcaaaaataaggttatcaagtgagaaatcaccatgagtgacgactgaatccggtgagaatggcaaaagtttatgcatttctttccagacttgttcaacaggccagccattacgctcgtcatcaaaatcactcgcatcaaccaaaccgttattcattcgtgattgcgcctgagcgagacgaaatacgcgatcgctgttaaaaggacaattacaaacaggaatcgaatgcaaccggcgcaggaacactgccagcgcatcaacaatattttcacctgaatcaggatattcttctaatacctggaatgctgttttcccggggatcgcagtggtgagtaaccatgcatcatcaggagtacggataaaatgcttgatggtcggaagaggcataaattccgtcagccagtttagtctgaccatctcatctgtaacatcattggcaacgctacctttgccatgtttcagaaacaactctggcgcatcgggcttcccatacaatcgatagattgtcgcacctgattgcccgacattatcgcgagcccatttatacccatataaatcagcatccatgttggaatttaatcgcggcctagagcaagacgtttcccgttgaatatggctcataacaccccttgtattactgtttatgtaagcagacagttttattgttcatgaccaaaatcccttaacgtgagttttcgttccactgagcgtcagaccccgtagaaaagatcaaaggatcttcttgagatcctttttttctgcgcgtaatctgctgcttgcaaacaaaaaaaccaccgctaccagcggtggtttgtttgccggatcaagagctaccaactctttttccgaaggtaactggcttcagcagagcgcagataccaaatactgtccttctagtgtagccgtagttaggccaccacttcaagaactctgtagcaccgcctacatacctcgctctgctaatcctgttaccagtggctgctgccagtggcgataagtcgtgtcttaccgggttggactcaagacgatagttaccggataaggcgcagcggtcgggctgaacggggggttcgtgcacacagcccagcttggagcgaacgacctacaccgaactgagatacctacagcgtgagctatgagaaagcgccacgcttcccgaagggagaaaggcggacaggtatccggtaagcggcagggtcggaacaggagagcgcacgagggagcttccagggggaaacgcctggtatctttatagtcctgtcgggtttcgccacctctgacttgagcgtcgatttttgtgatgctcgtcaggggggcggagcctatggaaaaacgccagcaacgcggcctttttacggttcctggccttttgctggccttttgctcacatgttctttcctgcgttatcccctgattctgtggataaccgtattaccgcctttgagtgagctgataccgctcgccgcagccgaacgaccgagcgcagcgagtcagtgagcgaggaagcggaagagcgcctgatgcggtattttctccttacgcatctgtgcggtatttcacaccgcatatatggtgcactctcagtacaatctgctctgatgccgcatagttaagccagtatacactccgctatcgctacgtgactgggtcatggctgcgccccgacacccgccaacacccgctgacgcgccctgacgggcttgtctgctcccggcatccgcttacagacaagctgtgaccgtctccgggagctgcatgtgtcagaggttttcaccgtcatcaccgaaacgcgcgaggcagctgcggtaaagctcatcagcgtggtcgtgaagcgattcacagatgtctgcctgttcatccgcgtccagctcgttgagtttctccagaagcgttaatgtctggcttctgataaagcgggccatgttaagggcggttttttcctgtttggtcactgatgcctccgtgtaagggggatttctgttcatgggggtaatgataccgatgaaacgagagaggatgctcacgatacgggttactgatgatgaacatgcccggttactggaacgttgtgagggtaaacaactggcggtatggatgcggcgggaccagagaaaaatcactcagggtcaatgccagcgcttcgttaatacagatgtaggtgttccacagggtagccagcagcatcctgcgatgcagatccggaacataatggtgcagggcgctgacttccgcgtttccagactttacgaaacacggaaaccgaagaccattcatgttgttgctcaggtcgcagacgttttgcagcagcagtcgcttcacgttcgctcgcgtatcggtgattcattctgctaaccagtaaggcaaccccgccagcctagccgggtcctcaacgacaggagcacgatcatgcgcacccgtggggccgccatgccggcgataatggcctgcttctcgccgaaacgtttggtggcgggaccagtgacgaaggcttgagcgagggcgtgcaagattccgaataccgcaagcgacaggccgatcatcgtcgcgctccagcgaaagcggtcctcgccgaaaatgacccagagcgctgccggcacctgtcctacgagttgcatgataaagaagacagtcataagtgcggcgacgatagtcatgccccgcgcccaccggaaggagctgactgggttgaaggctctcaagggcatcggtcgagatcccggtgcctaatgagtgagctaacttacattaattgcgttgcgctcactgcccgctttccagtcgggaaacctgtcgtgccagctgcattaatgaatcggccaacgcgcggggagaggcggtttgcgtattgggcgccagggtggtttttcttttcaccagtgagacgggcaacagctgattgcccttcaccgcctggccctgagagagttgcagcaagcggtccacgctggtttgccccagcaggcgaaaatcctgtttgatggtggttaacggcgggatataacatgagctgtcttcggtatcgtcgtatcccactaccgagatatccgcaccaacgcgcagcccggactcggtaatggcgcgcattgcgcccagcgccatctgatcgttggcaaccagcatcgcagtgggaacgatgccctcattcagcatttgcatggtttgttgaaaaccggacatggcactccagtcgccttcccgttccgctatcggctgaatttgattgcgagtgagatatttatgccagccagccagacgcagacgcgccgagacagaacttaatgggcccgctaacagcgcgatttgctggtgacccaatgcgaccagatgctccacgcccagtcgcgtaccgtcttcatgggagaaaataatactgttgatgggtgtctggtcagagacatcaagaaataacgccggaacattagtgcaggcagcttccacagcaatggcatcctggtcatccagcggatagttaatgatcagcccactgacgcgttgcgcgagaagattgtgcaccgccgctttacaggcttcgacgccgcttcgttctaccatcgacaccaccacgctggcacccagttgatcggcgcgagatttaatcgccgcgacaatttgcgacggcgcgtgcagggccagactggaggtggcaacgccaatcagcaacgactgtttgcccgccagttgttgtgccacgcggttgggaatgtaattcagctccgccatcgccgcttccactttttcccgcgttttcgcagaaacgtggctggcctggttcaccacgcgggaaacggtctgataagagacaccggcatactctgcgacatcgtataacgttactggtttcacattcaccaccctgaattgactctcttccgggcgctatcatgccataccgcgaaaggttttgcgccattcgatggtgtccgggatctcgacgctctcccttatgcgactcctgcattaggaagcagcccagtagtaggttgaggccgttgagcaccgccgccgcaaggaatggtgcatgcaaggagatggcgcccaacagtcccccggccacggggcctgccaccatacccacgccgaaacaagcgctcatgagcccgaagtggcgagcccgatcttccccatcggtgatgtcggcgatataggcgccagcaaccgcacctgtggcgccggtgatgccggccacgatgcgtccggcgtagaggatcgagatctcgatcccgcgaaattaatacgactcactataggggaattgtgagcggataacaattcccctctagaaataattttgtttaactttaagaaggagatataccatgggcagcagccatcatcatcatcatcacagcagcggcctggtgccgcgcggcagccatatggctagtatggatctggatgcagtaaggattaaagtggacacagtaaatgcaaaaccgggagacacagtaaatatacctgtaagattcagtggtataccatccaagggaatagcaaactgtgactttgtatacagctatgacccgaatgtacttgagataatagagataaaaccgggagaattgatagttgacccgaatcctaccaagagctttgatactgcagtatatcctgacagaaagatgatagtattcctgtttgcggaagacagcggaacaggagcgtatgcaataactaaagacggagtatttgctacgatagtagcgaaagtaaaagaaggagcacctaacgggctcagtgtaatcaaatttgtagaagtaggcggatttgcgaacaatgaccttgtagaacagaagacacagttctttgacggtggagtaaatgttggagatacaacagaacctgcaacacctacaacacctgtaacaacaccgacaacaacagatgatctagatgcagctagtgtgtcgttcgtggtcacagtgccggaggccgtggcggctgcggcgggggatttggcggccatcggctcgacgcttcgggaagcgaccgctgcggcggcgggccccacgaccgggctggcggccgcggccgccgacgacgtgtcgatcgctgtctcgcagctgttcggcaggtacggccaggaatttcaaaccgtgagcaaccaactggccgcgtttcataccgagttcgtacgcacgttgaaccgcggcgcggcggcgtatctcaacaccgaaagcgctaacggcgggcagctgttcggtcagatcgaggcgggacagcgcgccgtttccgcggccgcggccgccgctccgggcggcgcatacggccaactcgttgccaacacggccaccaacctggaatccctctacggcgcatggtcggccaacccgttcccattcctccgccagatcatcgccaaccagcaggtttactggcagcagatcgccgcggcgctcgccaacgccgtccagaacttccccgccctggtggcgaatttgccagcggccatcgacgcggccgtccagcaattcctggccttcaacgcggcgtactacatccaacagattattagctcgcagatcggcttcgcccagctattcgccacgacggtcggtcagggggtcaccagcgtcattgccgggtggcccaaccttgcggcggagcttcagctagcgtttcaacagcttctggtgggtgactacaacgccgcggtggcgaacctgggtaaggccatgacaaaccttctggtcaccgggttcgacaccagcgacgtgacgatcggcacaatgggcaccaccattagtgtcaccgcgaaacccaagctgctgggcccgctgggagatctgttcaccatcatgaccatcccggcacaagaggcgcagtacttcaccaacctgatgcccccctccatcctgcgagacatgtcgcagaacttcaccaacgtgctcacgacgctctccaacccgaacatccaggcggtcgcttcgttcgatatcgcaaccaccgccgggactttgagcaccttcttcggggtgccattggtgctcacttacgccacattgggtgcgccgttcgcgtcactgaacgcgattgcgacgagcgcggaaaccatcgagcaggccctgttggccggcaactacctaggggcggtgggtgcgcttatcgacgccccggcccacgcgttagacggcttcctcaacagcgcaaccgtgttggatacgccgatcctggtgcccacggggctcccgtcccctctgcccccgacggtcgggatcacgctgcacttgcctttcgacgggattctcgtgccgccgcatcccgtcaccgcgacgatcagcttcccgggtgctccggttcctattcccggtttcccaaccaccgtaaccgttttcggcacacccttcatgggaatggctccgctgctgatcaactacattccccaacagctcgccctggcaatcaaaccggcggcttagctcgagcaccaccaccaccaccactgagatccggctgctaacaaagcccgaaaggaagctgagttggctgctgccaccgctgagcaataactagcataaccccttggggcctctaaacgggtcttgaggggttttttgctgaaaggaggaactatatccggat

SEQ ID NO: 165 - protein, 699 aa, Artificial Sequence
  Description of Artificial Sequence: Synthetic polypeptide
MGSSHHHHHHSSGLVPRGSHMASMDLDAVRIKVDTVNAKPGDTVNIPVRFSGIPSKGIANCDFVYSYDPNVLEIIEIKPGELIVDPNPTKSFDTAVYPDRKMIVFLFAEDSGTGAYAITKDGVFATIVAKVKEGAPNGLSVIKFVEVGGFANNDLVEQKTQFFDGGVNVGDTTEPATPTTPVTTPTTTDDLDAASVSFVVTVPEAVAAAAGDLAAIGSTLREATAAAAGPTTGLAAAAADDVSIAVSQLFGRYGQEFQTVSNQLAAFHTEFVRTLNRGAAAYLNTESANGGQLFGQIEAGQRAVSAAAAAAPGGAYGQLVANTATNLESLYGAWSANPFPFLRQIIANQQVYWQQIAAALANAVQNFPALVANLPAAIDAAVQQFLAFNAAYYIQQIISSQIGFAQLFATTVGQGVTSVIAGWPNLAAELQLAFQQLLVGDYNAAVANLGKAMTNLLVTGFDTSDVTIGTMGTTISVTAKPKLLGPLGDLFTIMTIPAQEAQYFTNLMPPSILRDMSQNFTNVLTTLSNPNIQAVASFDIATTAGTLSTFFGVPLVLTYATLGAPFASLNAIATSAETIEQALLAGNYLGAVGALIDAPAHALDGFLNSATVLDTPILVPTGLPSPLPPTVGITLHLPFDGILVPPHPVTATISFPGAPVPIPGFPTTVTVFGTPFMGMAPLLINYIPQQLALAIKPAA

SEQ ID NO: 166 - DNA, 6682 bp, Artificial Sequence
  Description of Artificial Sequence: Synthetic polynucleotide
tggcgaatgggacgcgccctgtagcggcgcattaagcgcggcgggtgtggtggttacgcgcagcgtgaccgctacacttgccagcgccctagcgcccgctcctttcgctttcttcccttcctttctcgccacgttcgccggctttccccgtcaagctctaaatcgggggctccctttagggttccgatttagtgctttacggcacctcgaccccaaaaaacttgattagggtgatggttcacgtagtgggccatcgccctgatagacggtttttcgccctttgacgttggagtccacgttctttaatagtggactcttgttccaaactggaacaacactcaaccctatctcggtctattcttttgatttataagggattttgccgatttcggcctattggttaaaaaatgagctgatttaacaaaaatttaacgcgaattttaacaaaatattaacgtttacaatttcaggtggcacttttcggggaaatgtgcgcggaacccctatttgtttatttttctaaatacattcaaatatgtatccgctcatgaattaattcttagaaaaactcatcgagcatcaaatgaaactgcaatttattcatatcaggattatcaataccatatttttgaaaaagccgtttctgtaatgaaggagaaaactcaccgaggcagttccataggatggcaagatcctggtatcggtctgcgattccgactcgtccaacatcaatacaacctattaatttcccctcgtcaaaaataaggttatcaagtgagaaatcaccatgagtgacgactgaatccggtgagaatggcaaaagtttatgcatttctttccagacttgttcaacaggccagccattacgctcgtcatcaaaatcactcgcatcaaccaaaccgttattcattcgtgattgcgcctgagcgagacgaaatacgcgatcgctgttaaaaggacaattacaaacaggaatcgaatgcaaccggcgcaggaacactgccagcgcatcaacaatattttcacctgaatcaggatattcttctaatacctggaatgctgttttcccggggatcgcagtggtgagtaaccatgcatcatcaggagtacggataaaatgcttgatggtcggaagaggcataaattccgtcagccagtttagtctgaccatctcatctgtaacatcattggcaacgctacctttgccatgtttcagaaacaactctggcgcatcgggcttcccatacaatcgatagattgtcgcacctgattgcccgacattatcgcgagcccatttatacccatataaatcagcatccatgttggaatttaatcgcggcctagagcaagacgtttcccgttgaatatggctcataacaccccttgtattactgtttatgtaagcagacagttttattgttcatgaccaaaatcccttaacgtgagttttcgttccactgagcgtcagaccccgtagaaaagatcaaaggatcttcttgagatcctttttttctgcgcgtaatctgctgcttgcaaacaaaaaaaccaccgctaccagcggtggtttgtttgccggatcaagagctaccaactctttttccgaaggtaactggcttcagcagagcgcagataccaaatactgtccttctagtgtagccgtagttaggccaccacttcaagaactctgtagcaccgcctacatacctcgctctgctaatcctgttaccagtggctgctgccagtggcgataagtcgtgtcttaccgggttggactcaagacgatagttaccggataaggcgcagcggtcgggctgaacggggggttcgtgcacacagcccagcttggagcgaacgacctacaccgaactgagatacctacagcgtgagctatgagaaagcgccacgcttcccgaagggagaaaggcggacaggtatccggtaagcggcagggtcggaacaggagagcgcacgagggagcttccagggggaaacgcctggtatctttatagtcctgtcgggtttcgccacctctgacttgagcgtcgatttttgtgatgctcgtcaggggggcggagcctatggaaaaacgccagcaacgcggcctttttacggttcctggccttttgctggccttttgctcacatgttctttcctgcgttatcccctgattctgtggataaccgtattaccgcctttgagtgagctgataccgctcgccgcagccgaacgaccgagcgcagcgagtcagtgagcgaggaagcggaagagcgcctgatgcggtattttctccttacgcatctgtgcggtatttcacaccgcatatatggtgcactctcagtacaatctgctctgatgccgcatagttaagccagtatacactccgctatcgctacgtgactgggtcatggctgcgccccgacacccgccaacacccgctgacgcgccctgacgggcttgtctgctcccggcatccgcttacagacaagctgtgaccgtctccgggagctgcatgtgtcagaggttttcaccgtcatcaccgaaacgcgcgaggcagctgcggtaaagctcatcagcgtggtcgtgaagcgattcacagatgtctgcctgttcatccgcgtccagctcgttgagtttctccagaagcgttaatgtctggcttctgataaagcgggccatgttaagggcggttttttcctgtttggtcactgatgcctccgtgtaagggggatttctgttcatgggggtaatgataccgatgaaacgagagaggatgctcacgatacgggttactgatgatgaacatgcccggttactggaacgttgtgagggtaaacaactggcggtatggatgcggcgggaccagagaaaaatcactcagggtcaatgccagcgcttcgttaatacagatgtaggtgttccacagggtagccagcagcatcctgcgatgcagatccggaacataatggtgcagggcgctgacttccgcgtttccagactttacgaaacacggaaaccgaagaccattcatgttgttgctcaggtcgcagacgttttgcagcagcagtcgcttcacgttcgctcgcgtatcggtgattcattctgctaaccagtaaggcaaccccgccagcctagccgggtcctcaacgacaggagcacgatcatgcgcacccgtggggccgccatgccggcgataatggcctgcttctcgccgaaacgtttggtggcgggaccagtgacgaaggcttgagcgagggcgtgcaagattccgaataccgcaagcgacaggccgatcatcgtcgcgctccagcgaaagcggtcctcgccgaaaatgacccagagcgctgccggcacctgtcctacgagttgcatgataaagaagacagtcataagtgcggcgacgatagtcatgccccgcgcccaccggaaggagctgactgggttgaaggctctcaagggcatcggtcgagatcccggtgcctaatgagtgagctaacttacattaattgcgttgcgctcactgcccgctttccagtcgggaaacctgtcgtgccagctgcattaatgaatcggccaacgcgcggggagaggcggtttgcgtattgggcgccagggtggtttttcttttcaccagtgagacgggcaacagctgattgcccttcaccgcctggccctgagagagttgcagcaagcggtccacgctggtttgccccagcaggcgaaaatcctgtttgatggtggttaacggcgggatataacatgagctgtcttcggtatcgtcgtatcccactaccgagatatccgcaccaacgcgcagcccggactcggtaatggcgcgcattgcgcccagcgccatctgatcgttggcaaccagcatcgcagtgggaacgatgccctcattcagcatttgcatggtttgttgaaaaccggacatggcactccagtcgccttcccgttccgctatcggctgaatttgattgcgagtgagatatttatgccagccagccagacgcagacgcgccgagacagaacttaatgggcccgctaacagcgcgatttgctggtgacccaatgcgaccagatgctccacgcccagtcgcgtaccgtcttcatgggagaaaataatactgttgatgggtgtctggtcagagacatcaagaaataacgccggaacattagtgcaggcagcttccacagcaatggcatcctggtcatccagcggatagttaatgatcagcccactgacgcgttgcgcgagaagattgtgcaccgccgctttacaggcttcgacgccgcttcgttctaccatcgacaccaccacgctggcacccagttgatcggcgcgagatttaatcgccgcgacaatttgcgacggcgcgtgcagggccagactggaggtggcaacgccaatcagcaacgactgtttgcccgccagttgttgtgccacgcggttgggaatgtaattcagctccgccatcgccgcttccactttttcccgcgttttcgcagaaacgtggctggcctggttcaccacgcgggaaacggtctgataagagacaccggcatactctgcgacatcgtataacgttactggtttcacattcaccaccctgaattgactctcttccgggcgctatcatgccataccgcgaaaggttttgcgccattcgatggtgtccgggatctcgacgctctcccttatgcgactcctgcattaggaagcagcccagtagtaggttgaggccgttgagcaccgccgccgcaaggaatggtgcatgcaaggagatggcgcccaacagtcccccggccacggggcctgccaccatacccacgccgaaacaagcgctcatgagcccgaagtggcgagcccgatcttccccatcggtgatgtcggcgatataggcgccagcaaccgcacctgtggcgccggtgatgccggccacgatgcgtccggcgtagaggatcgagatctcgatcccgcgaaattaatacgactcactataggggaattgtgagcggataacaattcccctctagaaataattttgtttaactttaagaaggagatataccatgggcagcagccatcatcatcatcatcacagcagcggcctggtgccgcgcggcagccatatggctagtatggatctggatgcagtaaggattaaagtggacacagtaaatgcaaaaccgggagacacagtaaatatacctgtaagattcagtggtataccatccaagggaatagcaaactgtgactttgtatacagctatgacccgaatgtacttgagataatagagataaaaccgggagaattgatagttgacccgaatcctaccaagagctttgatactgcagtatatcctgacagaaagatgatagtattcctgtttgcggaagacagcggaacaggagcgtatgcaataactaaagacggagtatttgctacgatagtagcgaaagtaaaagaaggagcacctaacgggctcagtgtaatcaaatttgtagaagtaggcggatttgcgaacaatgaccttgtagaacagaagacacagttctttgacggtggagtaaatgttggagatacaacagaacctgcaacacctacaacacctgtaacaacaccgacaacaacagatgatctagatgcagctagcatggctgaaccgttggccgtcgatcccaccggcttgagcgcagcggccgcgaaattggccggcctcgtttttccgcagcctccggcgccgatcgcggtcagcggaacggattcggtggtagcagcaatcaacgagaccatgccaagcatcgaatcgctggtcagtgacgggctgcccggcgtgaaagccgccctgactcgaacagcatccaacatgaacgcggcggcggacgtctatgcgaagaccgatcagtcactgggaaccagtttgagccagtatgcattcggctcgtcgggcgaaggcctggctggcgtcgcctcggtcggtggtcagccaagtcaggctacccagctgctgagcacacccgtgtcacaggtcacgacccagctcggcgagacggccgctgagctggcaccccgtgttgttgcgacggtgccgcaactcgttcagctggctccgcacgccgttcagatgtcgcaaaacgcatcccccatcgctcagacgatcagtcaaaccgcccaacaggccgcccagagcgcgcagggcggcagcggcccaatgcccgcacagcttgccagcgctgaaaaaccggccaccgagcaagcggagccggtccacgaagtgacaaacgacgatcagggcgaccagggcgacgtgcagccggccgaggtcgttgccgcggcacgtgacgaaggcgccggcgcatcaccgggccagcagcccggcgggggcgttcccgcgcaagccatggataccggagccggtgcccgcccagcggcgagtccgctggcggcccccgtcgatccgtcgactccggcaccctcaacaaccacaacgttggaattctaaaagcttgcggccgcactcgagcaccaccaccaccaccactgagatccggctgctaacaaagcccgaaaggaagctgagttggctgctgccaccgctgagcaataactagcataaccccttggggcctctaaacgggtcttgaggggttttttgctgaaaggaggaactatatccggat

SEQ ID NO: 167 - protein, 477 aa, Artificial Sequence
  Description of Artificial Sequence: Synthetic polypeptide
MGSSHHHHHHSSGLVPRGSHMASMDLDAVRIKVDTVNAKPGDTVNIPVRFSGIPSKGIANCDFVYSYDPNVLEIIEIKPGELIVDPNPTKSFDTAVYPDRKMIVFLFAEDSGTGAYAITKDGVFATIVAKVKEGAPNGLSVIKFVEVGGFANNDLVEQKTQFFDGGVNVGDTTEPATPTTPVTTPTTTDDLDAASMAEPLAVDPTGLSAAAAKLAGLVFPQPPAPIAVSGTDSVVAAINETMPSIESLVSDGLPGVKAALTRTASNMNAAADVYAKTDQSLGTSLSQYAFGSSGEGLAGVASVGGQPSQATQLLSTPVSQVTTQLGETAAELAPRVVATVPQLVQLAPHAVQMSQNASPIAQTISQTAQQAAQSAQGGSGPMPAQLASAEKPATEQAEPVHEVTNDDQGDQGDVQPAEVVAAARDEGAGASPGQQPGGGVPAQAMDTGAGARPAASPLAAPVDPSTPAPSTTTTLEF

SEQ ID NO: 168 - DNA, 8059 bp, Artificial Sequence
  Description of Artificial Sequence: Synthetic polynucleotide
tggcgaatgggacgcgccctgtagcggcgcattaagcgcggcgggtgtggtggttacgcgcagcgtgaccgctacacttgccagcgccctagcgcccgctcctttcgctttcttcccttcctttctcgccacgttcgccggctttccccgtcaagctctaaatcgggggctccctttagggttccgatttagtgctttacggcacctcgaccccaaaaaacttgattagggtgatggttcacgtagtgggccatcgccctgatagacggtttttcgccctttgacgttggagtccacgttctttaatagtggactcttgttccaaactggaacaacactcaaccctatctcggtctattcttttgatttataagggattttgccgatttcggcctattggttaaaaaatgagctgatttaacaaaaatttaacgcgaattttaacaaaatattaacgtttacaatttcaggtggcacttttcggggaaatgtgcgcggaacccctatttgtttatttttctaaatacattcaaatatgtatccgctcatgaattaattcttagaaaaactcatcgagcatcaaatgaaactgcaatttattcatatcaggattatcaataccatatttttgaaaaagccgtttctgtaatgaaggagaaaactcaccgaggcagttccataggatggcaagatcctggtatcggtctgcgattccgactcgtccaacatcaatacaacctattaatttcccctcgtcaaaaataaggttatcaagtgagaaatcaccatgagtgacgactgaatccggtgagaatggcaaaagtttatgcatttctttccagacttgttcaacaggccagccattacgctcgtcatcaaaatcactcgcatcaaccaaaccgttattcattcgtgattgcgcctgagcgagacgaaatacgcgatcgctgttaaaaggacaattacaaacaggaatcgaatgcaaccggcgcaggaacactgccagcgcatcaacaatattttcacctgaatcaggatattcttctaatacctggaatgctgttttcccggggatcgcagtggtgagtaaccatgcatcatcaggagtacggataaaatgcttgatggtcggaagaggcataaattccgtcagccagtttagtctgaccatctcatctgtaacatcattggcaacgctacctttgccatgtttcagaaacaactctggcgcatcgggcttcccatacaatcgatagattgtcgcacctgattgcccgacattatcgcgagcccatttatacccatataaatcagcatccatgttggaatttaatcgcggcctagagcaagacgtttcccgttgaatatggctcataacaccccttgtattactgtttatgtaagcagacagttttattgttcatgaccaaaatcccttaacgtgagttttcgttccactgagcgtcagaccccgtagaaaagatcaaaggatcttcttgagatcctttttttctgcgcgtaatctgctgcttgcaaacaaaaaaaccaccgctaccagcggtggtttgtttgccggatcaagagctaccaactctttttccgaaggtaactggcttcagcagagcgcagataccaaatactgtccttctagtgtagccgtagttaggccaccacttcaagaactctgtagcaccgcctacatacctcgctctgctaatcctgttaccagtggctgctgccagtggcgataagtcgtgtcttaccgggttggactcaagacgatagttaccggataaggcgcagcggtcgggctgaacggggggttcgtgcacacagcccagcttggagcgaacgacctacaccgaactgagatacctacagcgtgagctatgagaaagcgccacgcttcccgaagggagaaaggcggacaggtatccggtaagcggcagggtcggaacaggagagcgcacgagggagcttccagggggaaacgcctggtatctttatagtcctgtcgggtttcgccacctctgacttgagcgtcgatttttgtgatgctcgtcaggggggcggagcctatggaaaaacgccagcaacgcggcctttttacggttcctggccttttgctggccttttgctcacatgttctttcctgcgttatcccctgattctgtggataaccgtattaccgcctttgagtgagctgataccgctcgccgcagccgaacgaccgagcgcagcgagtcagtgagcgaggaagcggaagagcgcctgatgcggtattttctccttacgcatctgtgcggtatttcacaccgcatatatggtgcactctcagtacaatctgctctgatgccgcatagttaagccagtatacactccgctatcgctacgtgactgggtcatggctgcgccccgacacccgccaacacccgctgacgcgccctgacgggcttgtctgctcccggcatccgcttacagacaagctgtgaccgtctccgggagctgcatgtgtcagaggttttcaccgtcatcaccgaaacgcgcgaggcagctgcggtaaagctcatcagcgtggtcgtgaagcgattcacagatgtctgcctgttcatccgcgtccagctcgttgagtttctccagaagcgttaatgtctggcttctgataaagcgggccatgttaagggcggttttttcctgtttggtcactgatgcctccgtgtaagggggatttctgttcatgggggtaatgataccgatgaaacgagagaggatgctcacgatacgggttactgatgatgaacatgcccggttactggaacgttgtgagggtaaacaactggcggtatggatgcggcgggaccagagaaaaatcactcagggtcaatgccagcgcttcgttaatacagatgtaggtgttccacagggtagccagcagcatcctgcgatgcagatccggaacataatggtgcagggcgctgacttccgcgtttccagactttacgaaacacggaaaccgaagaccattcatgttgttgctcaggtcgcagacgttttgcagcagcagtcgcttcacgttcgctcgcgtatcggtgattcattctgctaaccagtaaggcaaccccgccagcctagccgggtcctcaacgacaggagcacgatcatgcgcacccgtggggccgccatgccggcgataatggcctgcttctcgccgaaacgtttggtggcgggaccagtgacgaaggcttgagcgagggcgtgcaagattccgaataccgcaagcgacaggccgatcatcgtcgcgctccagcgaaagcggtcctcgccgaaaatgacccagagcgctgccggcacctgtcctacgagttgcatgataaagaagacagtcataagtgcggcgacgatagtcatgccccgcgcccaccggaaggagctgactgggttgaaggctctcaagggcatcggtcgagatcccggtgcctaatgagtgagctaacttacattaattgcgttgcgctcactgcccgctttccagtcgggaaacctgtcgtgccagctgcattaatgaatcggccaacgcgcggggagaggcggtttgcgtattgggcgccagggtggtttttcttttcaccagtgagacgggcaacagctgattgcccttcaccgcctggccctgagagagttgcagcaagcggtccacgctggtttgccccagcaggcgaaaatcctgtttgatggtggttaacggcgggatataacatgagctgtcttcggtatcgtcgtatcccactaccgagatatccgcaccaacgcgcagcccggactcggtaatggcgcgcattgcgcccagcgccatctgatcgttggcaaccagcatcgcagtgggaacgatgccctcattcagcatttgcatggtttgttgaaaaccggacatggcactccagtcgccttcccgttccgctatcggctgaatttgattgcgagtgagatatttatgccagccagccagacgcagacgcgccgagacagaacttaatgggcccgctaacagcgcgatttgctggtgacccaatgcgaccagatgctccacgcccagtcgcgtaccgtcttcatgggagaaaataatactgttgatgggtgtctggtcagagacatcaagaaataacgccggaacattagtgcaggcagcttccacagcaatggcatcctggtcatccagcggatagttaatgatcagcccactgacgcgttgcgcgagaagattgtgcaccgccgctttacaggcttcgacgccgcttcgttctaccatcgacaccaccacgctggcacccagttgatcggcgcgagatttaatcgccgcgacaatttgcgacggcgcgtgcagggccagactggaggtggcaacgccaatcagcaacgactgtttgcccgccagttgttgtgccacgcggttgggaatgtaattcagctccgccatcgccgcttccactttttcccgcgttttcgcagaaacgtggctggcctggttcaccacgcgggaaacggtctgataagagacaccggcatactctgcgacatcgtataacgttactggtttcacattcaccaccctgaattgactctcttccgggcgctatcatgccataccgcgaaaggttttgcgccattcgatggtgtccgggatctcgacgctctcccttatgcgactcctgcattaggaagcagcccagtagtaggttgaggccgttgagcaccgccgccgcaaggaatggtgcatgcaaggagatggcgcccaacagtcccccggccacggggcctgccaccatacccacgccgaaacaagcgctcatgagcccgaagtggcgagcccgatcttccccatcggtgatgtcggcgatataggcgccagcaaccgcacctgtggcgccggtgatgccggccacgatgcgtccggcgtagaggatcgagatctcgatcccgcgaaattaatacgactcactataggggaattgtgagcggataacaattcccctctagaaataattttgtttaactttaagaaggagatataccatgggcagcagccatcatcatcatcatcacagcagcggcctggtgccgcgcggcagccatatggctagtatggatctggatgcagtaaggattaaagtggacacagtaaatgcaaaaccgggagacacagtaaatatacctgtaagattcagtggtataccatccaagggaatagcaaactgtgactttgtatacagctatgacccgaatgtacttgagataatagagataaaaccgggagaattgatagttgacccgaatcctaccaagagctttgatactgcagtatatcctgacagaaagatgatagtattcctgtttgcggaagacagcggaacaggagcgtatgcaataactaaagacggagtatttgctacgatagtagcgaaagtaaaagaaggagcacctaacgggctcagtgtaatcaaatttgtagaagtaggcggatttgcgaacaatgaccttgtagaacagaagacacagttctttgacggtggagtaaatgttggagatacaacagaacctgcaacacctacaacacctgtaacaacaccgacaacaacagatgatctagatgcagctagcatgacagatcgcgtgtcggtgggcaacttgcgcatcgctcgggtgctctacgacttcgtgaacaatgaagccctgcctggcaccgatatcgacccggacagcttctgggcgggcgtcgacaaggtcgtcgccgacctgaccccgcagaaccaagctctgttgaacgcccgcgacgagctgcaggcgcagatcgacaagtggcaccggcgtcgggtgatcgagcccatcgacatggatgcctaccgccagttcctcaccgagatcggctacctgcttcccgaacctgatgacttcaccatcaccacgtccggtgtcgacgctgagatcaccacgaccgccggcccccagctggtggtgccggtgctcaacgcgcggtttgctctgaacgcggccaacgctcgctggggctccctctacgacgccttgtatggcaccgatgtcatccccgagaccgacggcgccgaaaaaggccccacgtacaacaaggttcgtggcgacaaggtgatcgcgtatgcccgcaagttcctcgacgacagtgttccgctgtcgtcgggttcctttggcgacgccaccggtttcacagtgcaggatggccagctcgtggttgccttgccggataagtccaccggcctggccaaccccggccagttcgccggctacaccggcgcagccgagtcgccgacatcggtgctgctaatcaatcacggtttgcacatcgagatcctgatcgatccggagtcgcaggtcggcaccaccgaccgggccggcgtcaaggacgtgatcctggaatccgcgatcaccacgatcatggacttcgaggactcggtggccgccgtggacgccgccgacaaggtgctgggttatcggaactggctcggcctgaacaagggcgacctggcagcagcggtagacaaggacggcaccgctttcctgcgggtgctcaatagggaccggaactacaccgcacccggcggtggccagttcacgctgcctggacgcagcctcatgttcgtccgcaacgtcggtcacttgatgacgaatgacgccatcgtcgacactgacggcagcgaggtgttcgaaggcatcatggatgccctattcaccggcctgatcgccatccacgggctaaaggccagcgacgtcaacgggccgctgatcaacagccgcaccggctccatctacatcgtcaagccgaagatgcacggtccggccgaggtggcgtttacctgcgaactgttcagccgggttgaagatgtgctggggttgccgcaaaacaccatgaagatcggcatcatggacgaggaacgccggaccacggtcaacctcaaggcgtgcatcaaagctgccgcggaccgcgtggtgttcatcaacaccgggttcctggaccgcaccggcgatgaaatccacacctcgatggaggccggcccgatggtgcgcaagggcaccatgaagagccagccgtggatcttggcctacgaggaccacaacgtcgatgccggcctggccgccgggttcagcggccgagcccaggtcggcaagggcatgtggacaatgaccgagctgatggccgacatggtcgagacaaaaatcgcccagccgcgcgccggggccagcaccgcctgggttccctctcccactgcggccaccctgcatgcgctgcactaccaccaggtcgacgtcgccgcggtgcaacaaggactggcggggaagcgtcgcgccaccatcgaacaattgctgaccattccgctggccaaggaattggcctgggctcccgacgagatccgcgaagaggtcgacaacaactgtcaatccatcctcggctacgtggttcgctgggttgatcaaggtgtcggctgctcgaaggtgcccgacatccacgacgtcgcgctcatggaggaccgggccacgctgcgaatctccagccaattgttggccaactggctgcgccacggtgtgatcaccagcgcggatgtgcgggccagcttggagcggatggcgccgttggtcgatcgacaaaacgcgggcgacgtggcataccgaccgatggcacccaacttcgacgacagtatcgccttcctggccgcgcaggagctgatcttgtccggggcccagcagcccaacggctacaccgagccgatcctgcaccgacgtcgtcgggagtttaaggcccgggccgctgagaagccggccccatcggacagggccggtgacgatgcggcccgcgaattctaggcggccgcactcgagcaccaccaccaccaccactgagatccggctgctaacaaagcccgaaaggaagctgagttggctgctgccaccgctgagcaataactagcataaccccttggggcctctaaacgggtcttgaggggttttttgctgaaaggaggaactatatccggat

SEQ ID NO: 169 - protein, 936 aa, Artificial Sequence
  Description of Artificial Sequence: Synthetic polypeptide
MGSSHHHHHHSSGLVPRGSHMASMDLDAVRIKVDTVNAKPGDTVNIPVRFSGIPSKGIANCDFVYSYDPNVLEIIEIKPGELIVDPNPTKSFDTAVYPDRKMIVFLFAEDSGTGAYAITKDGVFATIVAKVKEGAPNGLSVIKFVEVGGFANNDLVEQKTQFFDGGVNVGDTTEPATPTTPVTTPTTTDDLDAASMTDRVSVGNLRIARVLYDFVNNEALPGTDIDPDSFWAGVDKVVADLTPQNQALLNARDELQAQIDKWHRRRVIEPIDMDAYRQFLTEIGYLLPEPDDFTITTSGVDAEITTTAGPQLVVPVLNARFALNAANARWGSLYDALYGTDVIPETDGAEKGPTYNKVRGDKVIAYARKFLDDSVPLSSGSFGDATGFTVQDGQLVVALPDKSTGLANPGQFAGYTGAAESPTSVLLINHGLHIEILIDPESQVGTTDRAGVKDVILESAITTIMDFEDSVAAVDAADKVLGYRNWLGLNKGDLAAAVDKDGTAFLRVLNRDRNYTAPGGGQFTLPGRSLMFVRNVGHLMTNDAIVDTDGSEVFEGIMDALFTGLIAIHGLKASDVNGPLINSRTGSIYIVKPKMHGPAEVAFTCELFSRVEDVLGLPQNTMKIGIMDEERRTTVNLKACIKAAADRVVFINTGFLDRTGDEIHTSMEAGPMVRKGTMKSQPWILAYEDHNVDAGLAAGFSGRAQVGKGMWTMTELMADMVETKIAQPRAGASTAWVPSPTAATLHALHYHQVDVAAVQQGLAGKRRATIEQLLTIPLAKELAWAPDEIREEVDNNCQSILGYVVRWVDQGVGCSKVPDIHDVALMEDRATLRISSQLLANWLRHGVITSADVRASLERMAPLVDRQNAGDVAYRPMAPNFDDSIAFLAAQELILSGAQQPNGYTEPILHRRRREFKARAAEKPAPSDRAGDDAAR

SEQ ID NO: 170 - DNA, 6655 bp, Artificial Sequence
  Description of Artificial Sequence: Synthetic polynucleotide
tggcgaatgggacgcgccctgtagcggcgcattaagcgcggcgggtgtggtggttacgcgcagcgtgaccgctacacttgccagcgccctagcgcccgctcctttcgctttcttcccttcctttctcgccacgttcgccggctttccccgtcaagctctaaatcgggggctccctttagggttccgatttagtgctttacggcacctcgaccccaaaaaacttgattagggtgatggttcacgtagtgggccatcgccctgatagacggtttttcgccctttgacgttggagtccacgttctttaatagtggactcttgttccaaactggaacaacactcaaccctatctcggtctattcttttgatttataagggattttgccgatttcggcctattggttaaaaaatgagctgatttaacaaaaatttaacgcgaattttaacaaaatattaacgtttacaatttcaggtggcacttttcggggaaatgtgcgcggaacccctatttgtttatttttctaaatacattcaaatatgtatccgctcatgaattaattcttagaaaaactcatcgagcatcaaatgaaactgcaatttattcatatcaggattatcaataccatatttttgaaaaagccgtttctgtaatgaaggagaaaactcaccgaggcagttccataggatggcaagatcctggtatcggtctgcgattccgactcgtccaacatcaatacaacctattaatttcccctcgtcaaaaataaggttatcaagtgagaaatcaccatgagtgacgactgaatccggtgagaatggcaaaagtttatgcatttctttccagacttgttcaacaggccagccattacgctcgtcatcaaaatcactcgcatcaaccaaaccgttattcattcgtgattgcgcctgagcgagacgaaatacgcgatcgctgttaaaaggacaattacaaacaggaatcgaatgcaaccggcgcaggaacactgccagcgcatcaacaatattttcacctgaatcaggatattcttctaatacctggaatgctgttttcccggggatcgcagtggtgagtaaccatgcatcatcaggagtacggataaaatgcttgatggtcggaagaggcataaattccgtcagccagtttagtctgaccatctcatctgtaacatcattggcaacgctacctttgccatgtttcagaaacaactctggcgcatcgggcttcccatacaatcgatagattgtcgcacctgattgcccgacattatcgcgagcccatttatacccatataaatcagcatccatgttggaatttaatcgcggcctagagcaagacgtttcccgttgaatatggctcataacaccccttgtattactgtttatgtaagcagacagttttattgttcatgaccaaaatcccttaacgtgagttttcgttccactgagcgtcagaccccgtagaaaagatcaaaggatcttcttgagatcctttttttctgcgcgtaatctgctgcttgcaaacaaaaaaaccaccgctaccagcggtggtttgtttgccggatcaagagctaccaactctttttccgaaggtaactggcttcagcagagcgcagataccaaatactgtccttctagtgtagccgtagttaggccaccacttcaagaactctgtagcaccgcctacatacctcgctctgctaatcctgttaccagtggctgctgccagtggcgataagtcgtgtcttaccgggttggactcaagacgatagttaccggataaggcgcagcggtcgggctgaacggggggttcgtgcacacagcccagcttggagcgaacgacctacaccgaactgagatacctacagcgtgagctatgagaaagcgccacgcttcccgaagggagaaaggcggacaggtatccggtaagcggcagggtcggaacaggagagcgcacgagggagcttccagggggaaacgcctggtatctttatagtcctgtcgggtttcgccacctctgacttgagcgtcgatttttgtgatgctcgtcaggggggcggagcctatggaaaaacgccagcaacgcggcctttttacggttcctggccttttgctggccttttgctcacatgttctttcctgcgttatcccctgattctgtggataaccgtattaccgcctttgagtgagctgataccgctcgccgcagccgaacgaccgagcgcagcgagtcagtgagcgaggaagcggaagagcgcctgatgcggtattttctccttacgcatctgtgcggtatttcacaccgcatatatggtgcactctcagtacaatctgctctgatgccgcatagttaagccagtatacactccgctatcgctacgtgactgggtcatggctgcgccccgacacccgccaacacccgctgacgcgccctgacgggcttgtctgctcccggcatccgcttacagacaagctgtgaccgtctccgggagctgcatgtgtcagaggttttcaccgtcatcaccgaaacgcgcgaggcagctgcggtaaagctcatcagcgtggtcgtgaagcgattcacagatgtctgcctgttcatccgcgtccagctcgttgagtttctccagaagcgttaatgtctggcttctgataaagcgggccatgttaagggcggttttttcctgtttggtcactgatgcctccgtgtaagggggatttctgttcatgggggtaatgataccgatgaaacgagagaggatgctcacgatacgggttactgatgatgaacatgcccggttactggaacgttgtgagggtaaacaactggcggtatggatgcggcgggaccagagaaaaatcactcagggtcaatgccagcgcttcgttaatacagatgtaggtgttccacagggtagccagcagcatcctgcgatgcagatccggaacataatggtgcagggcgctgacttccgcgtttccagactttacgaaacacggaaaccgaagaccattcatgttgttgctcaggtcgcagacgttttgcagcagcagtcgcttcacgttcgctcgcgtatcggtgattcattctgctaaccagtaaggcaaccccgccagcctagccgggtcctcaacgacaggagcacgatcatgcgcacccgtggggccgccatgccggcgataatggcctgcttctcgccgaaacgtttggtggcgggaccagtgacgaaggcttgagcgagggcgtgcaagattccgaataccgcaagcgacaggccgatcatcgtcgcgctccagcgaaagcggtcctcgccgaaaatgacccagagcgctgccggcacctgtcctacgagttgcatgataaagaagacagtcataagtgcggcgacgatagtcatgccccgcgcccaccggaaggagctgactgggttgaaggctctcaagggcatcggtcgagatcccggtgcctaatgagtgagctaacttacattaattgcgttgcgctcactgcccgctttccagtcgggaaacctgtcgtgccagctgcattaatgaatcggccaacgcgcggggagaggcggtttgcgtattgggcgccagggtggtttttcttttcaccagtgagacgggcaacagctgattgcccttcaccgcctggccctgagagagttgcagcaagcggtccacgctggtttgccccagcaggcgaaaatcctgtttgatggtggttaacggcgggatataacatgagctgtcttcggtatcgtcgtatcccactaccgagatatccgcaccaacgcgcagcccggactcggtaatggcgcgcattgcgcccagcgccatctgatcgttggcaaccagcatcgcagtgggaacgatgccctcattcagcatttgcatggtttgttgaaaaccggacatggcactccagtcgccttcccgttccgctatcggctgaatttgattgcgagtgagatatttatgccagccagccagacgcagacgcgccgagacagaacttaatgggcccgctaacagcgcgatttgctggtgacccaatgcgaccagatgctccacgcccagtcgcgtaccgtcttcatgggagaaaataatactgttgatgggtgtctggtcagagacatcaagaaataacgccggaacattagtgcaggcagcttccacagcaatggcatcctggtcatccagcggatagttaatgatcagcccactgacgcgttgcgcgagaagattgtgcaccgccgctttacaggcttcgacgccgcttcgttctaccatcgacaccaccacgctggcacccagttgatcggcgcgagatttaatcgccgcgacaatttgcgacggcgcgtgcagggccagactggaggtggcaacgccaatcagcaacgactgtttgcccgccagttgttgtgccacgcggttgggaatgtaattcagctccgccatcgccgcttccactttttcccgcgttttcgcagaaacgtggctggcctggttcaccacgcgggaaacggtctgataagagacaccggcatactctgcgacatcgtataacgttactggtttcacattcaccaccctgaattgactctcttccgggcgctatcatgccataccgcgaaaggttttgcgccattcgatggtgtccgggatctcgacgctctcccttatgcgactcctgcattaggaagcagcccagtagtaggttgaggccgttgagcaccgccgccgcaaggaatggtgcatgcaaggagatggcgcccaacagtcccccggccacggggcctgccaccatacccacgccgaaacaagcgctcatgagcccgaagtggcgagcccgatcttccccatcggtgatgtcggcgatataggcgccagcaaccgcacctgtggcgccggtgatgccggccacgatgcgtccggcgtagaggatcgagatctcgatcccgcgaaattaatacgactcactataggggaattgtgagcggataacaattcccctctagaaataattttgtttaactttaagaaggagatataccatgggcagcagccatcatcatcatcatcacagcagcggcctggtgccgcgcggcagccatatggctagtatggatctggatgcagtaaggattaaagtggacacagtaaatgcaaaaccgggagacacagtaaatatacctgtaagattcagtggtataccatccaagggaatagcaaactgtgactttgtatacagctatgacccgaatgtacttgagataatagagataaaaccgggagaattgatagttgacccgaatcctaccaagagctttgatactgcagtatatcctgacagaaagatgatagtattcctgtttgcggaagacagcggaacaggagcgtatgcaataactaaagacggagtatttgctacgatagtagcgaaagtaaaagaaggagcacctaacgggctcagtgtaatcaaatttgtagaagtaggcggatttgcgaacaatgaccttgtagaacagaagacacagttctttgacggtggagtaaatgttggagatacaacagaacctgcaacacctacaacacctgtaacaacaccgacaacaacagatgatctagatgcagctagcgcggaacccaccgccaaggccgccccatacgagaacctgatggtgccgtcgccctcgatgggccgggacatcccggtggccttcctagccggtgggccgcacgcggtgtatctgctggacgccttcaacgccggcccggatgtcagtaactgggtcaccgcgggtaacgcgatgaacacgttggcgggcaaggggatttcggtggtggcaccggccggtggtgcgtacagcatgtacaccaactgggagcaggatggcagcaagcagtgggacaccttcttgtccgctgagctgcccgactggctggccgctaaccggggcttggcccccggtggccatgcggccgttggcgccgctcagggcggttacggggcgatggcgctggcggccttccaccccgaccgcttcggcttcgctggctcgatgtcgggctttttgtacccgtcgaacaccaccaccaacggtgcgatcgcggcgggcatgcagcaattcggcggtgtggacaccaacggaatgtggggagcaccacagctgggtcggtggaagtggcacgacccgtgggtgcatgccagcctgctggcgcaaaacaacacccgggtgtgggtgtggagcccgaccaacccgggagccagcgatcccgccgccatgatcggccaagccgccgaggcgatgggtaacagccgcatgttctacaaccagtatcgcagcgtcggcgggcacaacggacacttcgacttcccagccagcggtgacaacggctggggctcgtgggcgccccagctgggcgctatgtcgggcgatatcgtcggtgcgatccgcgaattctaagcggccgcactcgagcaccaccaccaccaccactgagatccggctgctaacaaagcccgaaaggaagctgagttggctgctgccaccgctgagcaataactagcataaccccttggggcctctaaacgggtcttgaggggttttttgctgaaaggaggaactatatccggat

SEQ ID NO: 171 - protein, 420 aa, Artificial Sequence
  Description of Artificial Sequence: Synthetic polypeptide
MGSSHHHHHHSSGLVPRGSHMASMDLDAVRIKVDTVNAKPGDTVNIPVRFSGIPSKGIANCDFVYSYDPNVLEIIEIKPGELIVDPNPTKSFDTAVYPDRKMIVFLFAEDSGTGAYAITKDGVFATIVAKVKEGAPNGLSVIKFVEVGGFANNDLVEQKTQFFDGGVNVGDTTEPATPTTPVTTPTTTDDLDAASAEPTAKAAPYENLMVPSPSMGRDIPVAFLAGGPHAVYLLDAFNAGPDVSNWVTAGNAMNTLAGKGISVVAPAGGAYSMYTNWEQDGSKQWDTFLSAELPDWLAANAIAAGMQQFGGVDTNGMWGAPQLGRWKWHDPWVHASLLAQNNTRVWVWSPTNPGASDPAAMIGQAAEAMGNSRMFYNQYRSVGGHNGHFDFPASGDNGWGSWAPQLGAMSGDIVGAIREF

SEQ ID NO: 172 - DNA, 6262 bp, Artificial Sequence
  Description of Artificial Sequence: Synthetic polynucleotide
tggcgaatgggacgcgccctgtagcggcgcattaagcgcggcgggtgtggtggttacgcgcagcgtgaccgctacacttgccagcgccctagcgcccgctcctttcgctttcttcccttcctttctcgccacgttcgccggctttccccgtcaagctctaaatcgggggctccctttagggttccgatttagtgctttacggcacctcgaccccaaaaaacttgattagggtgatggttcacgtagtgggccatcgccctgatagacggtttttcgccctttgacgttggagtccacgttctttaatagtggactcttgttccaaactggaacaacactcaaccctatctcggtctattcttttgatttataagggattttgccgatttcggcctattggttaaaaaatgagctgatttaacaaaaatttaacgcgaattttaacaaaatattaacgtttacaatttcaggtggcacttttcggggaaatgtgcgcggaacccctatttgtttatttttctaaatacattcaaatatgtatccgctcatgaattaattcttagaaaaactcatcgagcatcaaatgaaactgcaatttattcatatcaggattatcaataccatatttttgaaaaagccgtttctgtaatgaaggagaaaactcaccgaggcagttccataggatggcaagatcctggtatcggtctgcgattccgactcgtccaacatcaatacaacctattaatttcccctcgtcaaaaataaggttatcaagtgagaaatcaccatgagtgacgactgaatccggtgagaatggcaaaagtttatgcatttctttccagacttgttcaacaggccagccattacgctcgtcatcaaaatcactcgcatcaaccaaaccgttattcattcgtgattgcgcctgagcgagacgaaatacgcgatcgctgttaaaaggacaattacaaacaggaatcgaatgcaaccggcgcaggaacactgccagcgcatcaacaatattttcacctgaatcaggatattcttctaatacctggaatgctgttttcccggggatcgcagtggtgagtaaccatgcatcatcaggagtacggataaaatgcttgatggtcggaagaggcataaattccgtcagccagtttagtctgaccatctcatctgtaacatcattggcaacgctacctttgccatgtttcagaaacaactctggcgcatcgggcttcccatacaatcgatagattgtcgcacctgattgcccgacattatcgcgagcccatttatacccatataaatcagcatccatgttggaatttaatcgcggcctagagcaagacgtttcccgttgaatatggctcataacaccccttgtattactgtttatgtaagcagacagttttattgttcatgaccaaaatcccttaacgtgagttttcgttccactgagcgtcagaccccgtagaaaagatcaaaggatcttcttgagatcctttttttctgcgcgtaatctgctgcttgcaaacaaaaaaaccaccgctaccagcggtggtttgtttgccggatcaagagctaccaactctttttccgaaggtaactggcttcagcagagcgcagataccaaatactgtccttctagtgtagccgtagttaggccaccacttcaagaactctgtagcaccgcctacatacctcgctctgctaatcctgttaccagtggctgctgccagtggcgataagtcgtgtcttaccgggttggactcaagacgatagttaccggataaggcgcagcggtcgggctgaacggggggttcgtgcacacagcccagcttggagcgaacgacctacaccgaactgagatacctacagcgtgagctatgagaaagcgccacgcttcccgaagggagaaaggcggacaggtatccggtaagcggcagggtcggaacaggagagcgcacgagggagcttccagggggaaacgcctggtatctttatagtcctgtcgggtttcgccacctctgacttgagcgtcgatttttgtgatgctcgtcaggggggcggagcctatggaaaaacgccagcaacgcggcctttttacggttcctggccttttgctggccttttgctcacatgttctttcctgcgttatcccctgattctgtggataaccgtattaccgcctttgagtgagctgataccgctcgccgcagccgaacgaccgagcgcagcgagtcagtgagcgaggaagcggaagagcgcctgatgcggtattttctccttacgcatctgtgcggtatttcacaccgcatatatggtgcactctcagtacaatctgctctgatgccgcatagttaagccagtatacactccgctatcgctacgtgactgggtcatggctgcgccccgacacccgccaacacccgctgacgcgccctgacgggcttgtctgctcccggcatccgcttacagacaagctgtgaccgtctccgggagctgcatgtgtcagaggttttcaccgtcatcaccgaaacgcgcgaggcagctgcggtaaagctcatcagcgtggtcgtgaagcgattcacagatgtctgcctgttcatccgcgtccagctcgttgagtttctccagaagcgttaatgtctggcttctgataaagcgggccatgttaagggcggttttttcctgtttggtcactgatgcctccgtgtaagggggatttctgttcatgggggtaatgataccgatgaaacgagagaggatgctcacgatacgggttactgatgatgaacatgcccggttactggaacgttgtgagggtaaacaactggcggtatggatgcggcgggaccagagaaaaatcactcagggtcaatgccagcgcttcgttaatacagatgtaggtgttccacagggtagccagcagcatcctgcgatgcagatccggaacataatggtgcagggcgctgacttccgcgtttccagactttacgaaacacggaaaccgaagaccattcatgttgttgctcaggtcgcagacgttttgcagcagcagtcgcttcacgttcgctcgcgtatcggtgattcattctgctaaccagtaaggcaaccccgccagcctagccgggtcctcaacgacaggagcacgatcatgcgcacccgtggggccgccatgccggcgataatggcctgcttctcgccgaaacgtttggtggcgggaccagtgacgaaggcttgagcgagggcgtgcaagattccgaataccgcaagcgacaggccgatcatcgtcgcgctccagcgaaagcggtcctcgccgaaaatgacccagagcgctgccggcacctgtcctacgagttgcatgataaagaagacagtcataagtgcggcgacgatagtcatgccccgcgcccaccggaaggagctgactgggttgaaggctctcaagggcatcggtcgagatcccggtgcctaatgagtgagctaacttacattaattgcgttgcgctcactgcccgctttccagtcgggaaacctgtcgtgccagctgcattaatgaatcggccaacgcgcggggagaggcggtttgcgtattgggcgccagggtggtttttcttttcaccagtgagacgggcaacagctgattgcccttcaccgcctggccctgagagagttgcagcaagcggtccacgctggtttgccccagcaggcgaaaatcctgtttgatggtggttaacggcgggatataacatgagctgtcttcggtatcgtcgtatcccactaccgagatatccgcaccaacgcgcagcccggactcggtaatggcgcgcattgcgcccagcgccatctgatcgttggcaaccagcatcgcagtgggaacgatgccctcattcagcatttgcatggtttgttgaaaaccggacatggcactccagtcgccttcccgttccgctatcggctgaatttgattgcgagtgagatatttatgccagccagccagacgcagacgcgccgagacagaacttaatgggcccgctaacagcgcgatttgctggtgacccaatgcgaccagatgctccacgcccagtcgcgtaccgtcttcatgggagaaaataatactgttgatgggtgtctggtcagagacatcaagaaataacgccggaacattagtgcaggcagcttccacagcaatggcatcctggtcatccagcggatagttaatgatcagcccactgacgcgttgcgcgagaagattgtgcaccgccgctttacaggcttcgacgccgcttcgttctaccatcgacaccaccacgctggcacccagttgatcggcgcgagatttaatcgccgcgacaatttgcgacggcgcgtgcagggccagactggaggtggcaacgccaatcagcaacgactgtttgcccgccagttgttgtgccacgcggttgggaatgtaattcagctccgccatcgccgcttccactttttcccgcgttttcgcagaaacgtggctggcctggttcaccacgcgggaaacggtctgataagagacaccggcatactctgcgacatcgtataacgttactggtttcacattcaccaccctgaattgactctcttccgggcgctatcatgccataccgcgaaaggttttgcgccattcgatggtgtccgggatctcgacgctctcccttatgcgactcctgcattaggaagcagcccagtagtaggttgaggccgttgagcaccgccgccgcaaggaatggtgcatgcaaggagatggcgcccaacagtcccccggccacggggcctgccaccatacccacgccgaaacaagcgctcatgagcccgaagtggcgagcccgatcttccccatcggtgatgtcggcgatataggcgccagcaaccgcacctgtggcgccggtgatgccggccacgatgcgtccggcgtagaggatcgagatctcgatcccgcgaaattaatacgactcactataggggaattgtgagcggataacaattcccctctagaaataattttgtttaactttaagaaggagatataccatgggcagcagccatcatcatcatcatcacagcagcggcctggtgccgcgcggcagccatatggctagtatggatctggatgcagtaaggattaaagtggacacagtaaatgcaaaaccgggagacacagtaaatatacctgtaagattcagtggtataccatccaagggaatagcaaactgtgactttgtatacagctatgacccgaatgtacttgagataatagagataaaaccgggagaattgatagttgacccgaatcctaccaagagctttgatactgcagtatatcctgacagaaagatgatagtattcctgtttgcggaagacagcggaacaggagcgtatgcaataactaaagacggagtatttgctacgatagtagcgaaagtaaaagaaggagcacctaacgggctcagtgtaatcaaatttgtagaagtaggcggatttgcgaacaatgaccttgtagaacagaagacacagttctttgacggtggagtaaatgttggagatacaacagaacctgcaacacctacaacacctgtaacaacaccgacaacaacagatgatctagatgcagctagcatggccaccacccttcccgttcagcgccacccgcggtccctcttccccgagttttctgagctgttcgcggccttcccgtcattcgccggactccggcccaccttcgacacccggttgatgcggctggaagacgagatgaaagaggggcgctacgaggtacgcgcggagcttcccggggtcgaccccgacaaggacgtcgacattatggtccgcgatggtcagctgaccatcaaggccgagcgcaccgagcagaaggacttcgacggtcgctcggaattcgcgtacggttccttcgttcgcacggtgtcgctgccggtaggtgctgacgaggacgacattaaggccacctacgacaagggcattcttactgtgtcggtggcggtttcggaagggaagccaaccgaaaagcacattcagatccggtccaccaactgagcggccgcactcgagcaccaccaccaccaccactgagatccggctgctaacaaagcccgaaaggaagctgagttggctgctgccaccgctgagcaataactagcataaccccttggggcctctaaacgggtcttgaggggttttttgctgaaaggaggaactatatccggat

SEQ ID NO: 173 - protein, 339 aa, Artificial Sequence
  Description of Artificial Sequence: Synthetic polypeptide
MGSSHHHHHHSSGLVPRGSHMASMDLDAVRIKVDTVNAKPGDTVNIPVRFSGIPSKGIANCDFVYSYDPNVLEIIEIKPGELIVDPNPTKSFDTAVYPDRKMIVFLFAEDSGTGAYAITKDGVFATIVAKVKEGAPNGLSVIKFVEVGGFANNDLVEQKTQFFDGGVNVGDTTEPATPTTPVTTPTTTDDLDAASMATTLPVQRHPRSLFPEFSELFAAFPSFAGLRPTFDTRLMRLEDEMKEGRYEVRAELPGVDPDKDVDIMVRDGQLTIKAERTEQKDFDGRSEFAYGSFVRTVSLPVGADEDDIKATYDKGILTVSVAVSEGKPTEKHIQIRSTN

SEQ ID NO: 174 - DNA, 6415 bp, Artificial Sequence
  Description of Artificial Sequence: Synthetic polynucleotide
tggcgaatgggacgcgccctgtagcggcgcattaagcgcggcgggtgtggtggttacgcgcagcgtgaccgctacacttgccagcgccctagcgcccgctcctttcgctttcttcccttcctttctcgccacgttcgccggctttccccgtcaagctctaaatcgggggctccctttagggttccgatttagtgctttacggcacctcgaccccaaaaaacttgattagggtgatggttcacgtagtgggccatcgccctgatagacggtttttcgccctttgacgttggagtccacgttctttaatagtggactcttgttccaaactggaacaacactcaaccctatctcggtctattcttttgatttataagggattttgccgatttcggcctattggttaaaaaatgagctgatttaacaaaaatttaacgcgaattttaacaaaatattaacgtttacaatttcaggtggcacttttcggggaaatgtgcgcggaacccctatttgtttatttttctaaatacattcaaatatgtatccgctcatgaattaattcttagaaaaactcatcgagcatcaaatgaaactgcaatttattcatatcaggattatcaataccatatttttgaaaaagccgtttctgtaatgaaggagaaaactcaccgaggcagttccataggatggcaagatcctggtatcggtctgcgattccgactcgtccaacatcaatacaacctattaatttcccctcgtcaaaaataaggttatcaagtgagaaatcaccatgagtgacgactgaatccggtgagaatggcaaaagtttatgcatttctttccagacttgttcaacaggccagccattacgctcgtcatcaaaatcactcgcatcaaccaaaccgttattcattcgtgattgcgcctgagcgagacgaaatacgcgatcgctgttaaaaggacaattacaaacaggaatcgaatgcaaccggcgcaggaacactgccagcgcatcaacaatattttcacctgaatcaggatattcttctaatacctggaatgctgttttcccggggatcgcagtggtgagtaaccatgcatcatcaggagtacggataaaatgcttgatggtcggaagaggcataaattccgtcagccagtttagtctgaccatctcatctgtaacatcattggcaacgctacctttgccatgtttcagaaacaactctggcgcatcgggcttcccatacaatcgatagattgtcgcacctgattgcccgacattatcgcgagcccatttatacccatataaatcagcatccatgttggaatttaatcgcggcctagagcaagacgtttcccgttgaatatggctcataacaccccttgtattactgtttatgtaagcagacagttttattgttcatgaccaaaatcccttaacgtgagttttcgttccactgagcgtcagaccccgtagaaaagatcaaaggatcttcttgagatcctttttttctgcgcgtaatctgctgcttgcaaacaaaaaaaccaccgctaccagcggtggtttgtttgccggatcaagagctaccaactctttttccgaaggtaactggcttcagcagagcgcagataccaaatactgtccttctagtgtagccgtagttaggccaccacttcaagaactctgtagcaccgcctacatacctcgctctgctaatcctgttaccagtggctgctgccagtggcgataagtcgtgtcttaccgggttggactcaagacgatagttaccggataaggcgcagcggtcgggctgaacggggggttcgtgcacacagcccagcttggagcgaacgacctacaccgaactgagatacctacagcgtgagctatgagaaagcgccacgcttcccgaagggagaaaggcggacaggtatccggtaagcggcagggtcggaacaggagagcgcacgagggagcttccagggggaaacgcctggtatctttatagtcctgtcgggtttcgccacctctgacttgagcgtcgatttttgtgatgctcgtcaggggggcggagcctatggaaaaacgccagcaacgcggcctttttacggttcctggccttttgctggccttttgctcacatgttctttcctgcgttatcccctgattctgtggataaccgtattaccgcctttgagtgagctgataccgctcgccgcagccgaacgaccgagcgcagcgagtcagtgagcgaggaagcggaagagcgcctgatgcggtattttctccttacgcatctgtgcggtatttcacaccgcatatatggtgcactctcagtacaatctgctctgatgccgcatagttaagccagtatacactccgctatcgctacgtgactgggtcatggctgcgccccgacacccgccaacacccgctgacgcgccctgacgggcttgtctgctcccggcatccgcttacagacaagctgtgaccgtctccgggagctgcatgtgtcagaggttttcaccgtcatcaccgaaacgcgcgaggcagctgcggtaaagctcatcagcgtggtcgtgaagcgattcacagatgtctgcctgttcatccgcgtccagctcgttgagtttctccagaagcgttaatgtctggcttctgataaagcgggccatgttaagggcggttttttcctgtttggtcactgatgcctccgtgtaagggggatttctgttcatgggggtaatgataccgatgaaacgagagaggatgctcacgatacgggttactgatgatgaacatgcccggttactggaacgttgtgagggtaaacaactggcggtatggatgcggcgggaccagagaaaaatcactcagggtcaatgccagcgcttcgttaatacagatgtaggtgttccacagggtagccagcagcatcctgcgatgcagatccggaacataatggtgcagggcgctgacttccgcgtttccagactttacgaaacacggaaaccgaagaccattcatgttgttgctcaggtcgcagacgttttgcagcagcagtcgcttcacgttcgctcgcgtatcggtgattcattctgctaaccagtaaggcaaccccgccagcctagccgggtcctcaacgacaggagcacgatcatgcgcacccgtggggccgccatgccggcgataatggcctgcttctcgccgaaacgtttggtggcgggaccagtgacgaaggcttgagcgagggcgtgcaagattccgaataccgcaagcgacaggccgatcatcgtcgcgctccagcgaaagcggtcctcgccgaaaatgacccagagcgctgccggcacctgtcctacgagttgcatgataaagaagacagtcataagtgcggcgacgatagtcatgccccgcgcccaccggaaggagctgactgggttgaaggctctcaagggcatcggtcgagatcccggtgcctaatgagtgagctaacttacattaattgcgttgcgctcactgcccgctttccagtcgggaaacctgtcgtgccagctgcattaatgaatcggccaacgcgcggggagaggcggtttgcgtattgggcgccagggtggtttttcttttcaccagtgagacgggcaacagctgattgcccttcaccgcctggccctgagagagttgcagcaagcggtccacgctggtttgccccagcaggcgaaaatcctgtttgatggtggttaacggcgggatataacatgagctgtcttcggtatcgtcgtatcccactaccgagatatccgcaccaacgcgcagcccggactcggtaatggcgcgcattgcgcccagcgccatctgatcgttggcaaccagcatcgcagtgggaacgatgccctcattcagcatttgcatggtttgttgaaaaccggacatggcactccagtcgccttcccgttccgctatcggctgaatttgattgcgagtgagatatttatgccagccagccagacgcagacgcgccgagacagaacttaatgggcccgctaacagcgcgatttgctggtgacccaatgcgaccagatgctccacgcccagtcgcgtaccgtcttcatgggagaaaataatactgttgatgggtgtctggtcagagacatcaagaaataacgccggaacattagtgcaggcagcttccacagcaatggcatcctggtcatccagcggatagttaatgatcagcccactgacgcgttgcgcgagaagattgtgcaccgccgctttacaggcttcgacgccgcttcgttctaccatcgacaccaccacgctggcacccagttgatcggcgcgagatttaatcgccgcgacaatttgcgacggcgcgtgcagggccagactggaggtggcaacgccaatcagcaacgactgtttgcccgccagttgttgtgccacgcggttgggaatgtaattcagctccgccatcgccgcttccactttttcccgcgttttcgcagaaacgtggctggcctggttcaccacgcgggaaacggtctgataagagacaccggcatactctgcgacatcgtataacgttactggtttcacattcaccaccctgaattgactctcttccgggcgctatcatgccataccgcgaaaggttttgcgccattcgatggtgtccgggatctcgacgctctcccttatgcgactcctgcattaggaagcagcccagtagtaggttgaggccgttgagcaccgccgccgcaaggaatggtgcatgcaaggagatggcgcccaacagtcccccggccacggggcctgccaccatacccacgccgaaacaagcgctcatgagcccgaagtggcgagcccgatcttccccatcggtgatgtcggcgatataggcgccagcaaccgcacctgtggcgccggtgatgccggccacgatgcgtccggcgtagaggatcgagatctcgatcccgcgaaattaatacgactcactataggggaattgtgagcggataacaattcccctctagaaataattttgtttaactttaagaaggagatataccatgggcagcagccatcatcatcatcatcacagcagcggcctggtgccgcgcggcagccatatggctagtatggatctggatgcagtaaggattaaagtggacacagtaaatgcaaaaccgggagacacagtaaatatacctgtaagattcagtggtataccatccaagggaatagcaaactgtgactttgtatacagctatgacccgaatgtacttgagataatagagataaaaccgggagaattgatagttgacccgaatcctaccaagagctttgatactgcagtatatcctgacagaaagatgatagtattcctgtttgcggaagacagcggaacaggagcgtatgcaataactaaagacggagtatttgctacgatagtagcgaaagtaaaagaaggagcacctaacgggctcagtgtaatcaaatttgtagaagtaggcggatttgcgaacaatgaccttgtagaacagaagacacagttctttgacggtggagtaaatgttggagatacaacagaacctgcaacacctacaacacctgtaacaacaccgacaacaacagatgatctagatgcagctagcatgaaggtaaagaacacaattgcggcaaccagtttcgcggcggccggcctggcggctctggcggtggctgtctcaccgccggcggccgcaggcgatctggtgggcccgggctgcgcggaatacgcggcagccaatcccactgggccggcctcggtgcagggaatgtcgcaggacccggtcgcggtggcggcctcgaacaatccggagttgacaacgctgacggctgcactgtcgggccagctcaatccgcaagtaaacctggtggacaccctcaacagcggtcagtacacggtgttcgcaccgaccaacgcggcatttagcaagctgccggcatccacgatcgacgagctcaagaccaattcgtcactgctgaccagcatcctgacctaccacgtagtggccggccaaaccagcccggccaacgtcgtcggcacccgtcagaccctccagggcgccagcgtgacggtgaccggtcagggtaacagcctcaaggtcggtaacgccgacgtcgtctgtggtggggtgtctaccgccaacgcgacggtgtacatgattgacagcgtgctaatgcctccggcgtaaaagcttgcggccgcactcgagcaccaccaccaccaccactgagatccggctgctaacaaagcccgaaaggaagctgagttggctgctgccaccgctgagcaataactagcataaccccttggggcctctaaacgggtcttgaggggttttttgctgaaaggaggaactatatccggat

SEQ ID NO: 175 - protein, 388 aa, Artificial Sequence
  Description of Artificial Sequence: Synthetic polypeptide
MGSSHHHHHHSSGLVPRGSHMASMDLDAVRIKVDTVNAKPGDTVNIPVRFSGIPSKGIANCDFVYSYDPNVLEIIEIKPGELIVDPNPTKSFDTAVYPDRKMIVFLFAEDSGTGAYAITKDGVFATIVAKVKEGAPNGLSVIKFVEVGGFANNDLVEQKTQFFDGGVNVGDTTEPATPTTPVTTPTTTDDLDAASMKVKNTIAATSFAAAGLAALAVAVSPPAAAGDLVGPGCAEYAAANPTGPASVQGMSQDPVAVAASNNPELTTLTAALSGQLNPQVNLVDTLNSGQYTVFAPTNAAFSKLPASTIDELKTNSSLLTSILTYHVVAGQTSPANVVGTRQTLQGASVTVTGQGNSLKVGNADVVCGGVSTANATVYMIDSVLMPPA

SEQ ID NO: 176 - DNA, 6895 bp, Artificial Sequence
  Description of Artificial Sequence: Synthetic polynucleotide
tggcgaatgggacgcgccctgtagcggcgcattaagcgcggcgggtgtggtggttacgcgcagcgtgaccgctacacttgccagcgccctagcgcccgctcctttcgctttcttcccttcctttctcgccacgttcgccggctttccccgtcaagctctaaatcgggggctccctttagggttccgatttagtgctttacggcacctcgaccccaaaaaacttgattagggtgatggttcacgtagtgggccatcgccctgatagacggtttttcgccctttgacgttggagtccacgttctttaatagtggactcttgttccaaactggaacaacactcaaccctatctcggtctattcttttgatttataagggattttgccgatttcggcctattggttaaaaaatgagctgatttaacaaaaatttaacgcgaattttaacaaaatattaacgtttacaatttcaggtggcacttttcggggaaatgtgcgcggaacccctatttgtttatttttctaaatacattcaaatatgtatccgctcatgaattaattcttagaaaaactcatcgagcatcaaatgaaactgcaatttattcatatcaggattatcaataccatatttttgaaaaagccgtttctgtaatgaaggagaaaactcaccgaggcagttccataggatggcaagatcctggtatcggtctgcgattccgactcgtccaacatcaatacaacctattaatttcccctcgtcaaaaataaggttatcaagtgagaaatcaccatgagtgacgactgaatccggtgagaatggcaaaagtttatgcatttctttccagacttgttcaacaggccagccattacgctcgtcatcaaaatcactcgcatcaaccaaaccgttattcattcgtgattgcgcctgagcgagacgaaatacgcgatcgctgttaaaaggacaattacaaacaggaatcgaatgcaaccggcgcaggaacactgccagcgcatcaacaatattttcacctgaatcaggatattcttctaatacctggaatgctgttttcccggggatcgcagtggtgagtaaccatgcatcatcaggagtacggataaaatgcttgatggtcggaagaggcataaattccgtcagccagtttagtctgaccatctcatctgtaacatcattggcaacgctacctttgccatgtttcagaaacaactctggcgcatcgggcttcccatacaatcgatagattgtcgcacctgattgcccgacattatcgcgagcccatttatacccatataaatcagcatccatgttggaatttaatcgcggcctagagcaagacgtttcccgttgaatatggctcataacaccccttgtattactgtttatgtaagcagacagttttattgttcatgaccaaaatcccttaacgtgagttttcgttccactgagcgtcagaccccgtagaaaagatcaaaggatcttcttgagatcctttttttctgcgcgtaatctgctgcttgcaaacaaaaaaaccaccgctaccagcggtggtttgtttgccggatcaagagctaccaactctttttccgaaggtaactggcttcagcagagcgcagataccaaatactgtccttctagtgtagccgtagttaggccaccacttcaagaactctgtagcaccgcctacatacctcgctctgctaatcctgttaccagtggctgctgccagtggcgataagtcgtgtcttaccgggttggactcaagacgatagttaccggataaggcgcagcggtcgggctgaacggggggttcgtgcacacagcccagcttggagcgaacgacctacaccgaactgagatacctacagcgtgagctatgagaaagcgccacgcttcccgaagggagaaaggcggacaggtatccggtaagcggcagggtcggaacaggagagcgcacgagggagcttccagggggaaacgcctggtatctttatagtcctgtcgggtttcgccacctctgacttgagcgtcgatttttgtgatgctcgtcaggggggcggagcctatggaaaaacgccagcaacgcggcctttttacggttcctggccttttgctggccttttgctcacatgttctttcctgcgttatcccctgattctgtggataaccgtattaccgcctttgagtgagctgataccgctcgccgcagccgaacgaccgagcgcagcgagtcagtgagcgaggaagcggaagagcgcctgatgcggtattttctccttacgcatctgtgcggtatttcacaccgcatatatggtgcactctcagtacaatctgctctgatgccgcatagttaagccagtatacactccgctatcgctacgtgactgggtcatggctgcgccccgacacccgccaacacccgctgacgcgccctgacgggcttgtctgctcccggcatccgcttacagacaagctgtgaccgtctccgggagctgcatgtgtcagaggttttcaccgtcatcaccgaaacgcgcgaggcagctgcggtaaagctcatcagcgtggtcgtgaagcgattcacagatgtctgcctgttcatccgcgtccagctcgttgagtttctccagaagcgttaatgtctggcttctgataaagcgggccatgttaagggcggttttttcctgtttggtcactgatgcctccgtgtaagggggatttctgttcatgggggtaatgataccgatgaaacgagagaggatgctcacgatacgggttactgatgatgaacatgcccggttactggaacgttgtgagggtaaacaactggcggtatggatgcggcgggaccagagaaaaatcactcagggtcaatgccagcgcttcgttaatacagatgtaggtgttccacagggtagccagcagcatcctgcgatgcagatccggaacataatggtgcagggcgctgacttccgcgtttccagactttacgaaacacggaaaccgaagaccattcatgttgttgctcaggtcgcagacgttttgcagcagcagtcgcttcacgttcgctcgcgtatcggtgattcattctgctaaccagtaaggcaaccccgccagcctagccgggtcctcaacgacaggagcacgatcatgcgcacccgtggggccgccatgccggcgataatggcctgcttctcgccgaaacgtttggtggcgggaccagtgacgaaggcttgagcgagggcgtgcaagattccgaataccgcaagcgacaggccgatcatcgtcgcgctccagcgaaagcggtcctcgccgaaaatgacccagagcgctgccggcacctgtcctacgagttgcatgataaagaagacagtcataagtgcggcgacgatagtcatgccccgcgcccaccggaaggagctgactgggttgaaggctctcaagggcatcggtcgagatcccggtgcctaatgagtgagctaacttacattaattgcgttgcgctcactgcccgctttccagtcgggaaacctgtcgtgccagctgcattaatgaatcggccaacgcgcggggagaggcggtttgcgtattgggcgccagggtggtttttcttttcaccagtgagacgggcaacagctgattgcccttcaccgcctggccctgagagagttgcagcaagcggtccacgctggtttgccccagcaggcgaaaatcctgtttgatggtggttaacggcgggatataacatgagctgtcttcggtatcgtcgtatcccactaccgagatatccgcaccaacgcgcagcccggactcggtaatggcgcgcattgcgcccagcgccatctgatcgttggcaaccagcatcgcagtgggaacgatgccctcattcagcatttgcatggtttgttgaaaaccggacatggcactccagtcgccttcccgttccgctatcggctgaatttgattgcgagtgagatatttatgccagccagccagacgcagacgcgccgagacagaacttaatgggcccgctaacagcgcgatttgctggtgacccaatgcgaccagatgctccacgcccagtcgcgtaccgtcttcatgggagaaaataatactgttgatgggtgtctggtcagagacatcaagaaataacgccggaacattagtgcaggcagcttccacagcaatggcatcctggtcatccagcggatagttaatgatcagcccactgacgcgttgcgcgagaagattgtgcaccgccgctttacaggcttcgacgccgcttcgttctaccatcgacaccaccacgctggcacccagttgatcggcgcgagatttaatcgccgcgacaatttgcgacggcgcgtgcagggccagactggaggtggcaacgccaatcagcaacgactgtttgcccgccagttgttgtgccacgcggttgggaatgtaattcagctccgccatcgccgcttccactttttcccgcgttttcgcagaaacgtggctggcctggttcaccacgcgggaaacggtctgataagagacaccggcatactctgcgacatcgtataacgttactggtttcacattcaccaccctgaattgactctcttccgggcgctatcatgccataccgcgaaaggttttgcgccattcgatggtgtccgggatctcgacgctctcccttatgcgactcctgcattaggaagcagcccagtagtaggttgaggccgttgagcaccgccgccgcaaggaatggtgcatgcaaggagatggcgcccaacagtcccccggccacggggcctgccaccatacccacgccgaaacaagcgctcatgagcccgaagtggcgagcccgatcttccccatcggtgatgtcggcgatataggcgccagcaaccgcacctgtggcgccggtgatgccggccacgatgcgtccggcgtagaggatcgagatctcgatcccgcgaaattaatacgactcactataggggaattgtgagcggataacaattcccctctagaaataattttgtttaactttaagaaggagatataccatgggcagcagccatcatcatcatcatcacagcagcggcctggtgccgcgcggcagccatatggctagtatggatctggatgcagtaaggattaaagtggacacagtaaatgcaaaaccgggagacacagtaaatatacctgtaagattcagtggtataccatccaagggaatagcaaactgtgactttgtatacagctatgacccgaatgtacttgagataatagagataaaaccgggagaattgatagttgacccgaatcctaccaagagctttgatactgcagtatatcctgacagaaagatgatagtattcctgtttgcggaagacagcggaacaggagcgtatgcaataactaaagacggagtatttgctacgatagtagcgaaagtaaaagaaggagcacctaacgggctcagtgtaatcaaatttgtagaagtaggcggatttgcgaacaatgaccttgtagaacagaagacacagttctttgacggtggagtaaatgttggagatacaacagaacctgcaacacctacaacacctgtaacaacaccgacaacaacagatgatctagatgcagctagcatgagcaattcgcgccgccgctcactcaggtggtcatggttgctgagcgtgctggctgccgtcgggctgggcctggccacggcgccggcccaggcggccccgccggccttgtcgcaggaccggttcgccgacttccccgcgctgcccctcgacccgtccgcgatggtcgcccaagtggggccacaggtggtcaacatcaacaccaaactgggctacaacaacgccgtgggcgccgggaccggcatcgtcatcgatcccaacggtgtcgtgctgaccaacaaccacgtgatcgcgggcgccaccgacatcaatgcgttcagcgtcggctccggccaaacctacggcgtcgatgtggtcgggtatgaccgcacccaggatgtcgcggtgctgcagctgcgcggtgccggtggcctgccgtcggcggcgatcggtggcggcgtcgcggttggtgagcccgtcgtcgcgatgggcaacagcggtgggcagggcggaacgccccgtgcggtgcctggcagggtggtcgcgctcggccaaaccgtgcaggcgtcggattcgctgaccggtgccgaagagacattgaacgggttgatccagttcgatgccgcgatccagcccggtgattcgggcgggcccgtcgtcaacggcctaggacaggtggtcggtatgaacacggccgcgtccgataacttccagctgtcccagggtgggcagggattcgccattccgatcgggcaggcgatggcgatcgcgggccagatccgatcgggtggggggtcacccaccgttcatatcgggcctaccgccttcctcggcttgggtgttgtcgacaacaacggcaacggcgcacgagtccaacgcgtggtcgggagcgctccggcggcaagtctcggcatctccaccggcgacgtgatcaccgcggtcgacggcgctccgatcaactcggccaccgcgatggcggacgcgcttaacgggcatcatcccggtgacgtcatctcggtgacctggcaaaccaagtcgggcggcacgcgtacagggaacgtgacattggccgagggacccccggcctgagcggccgcactcgagcaccaccaccaccaccactgagatccggctgctaacaaagcccgaaaggaagctgagttggctgctgccaccgctgagcaataactagcataaccccttggggcctctaaacgggtcttgaggggttttttgctgaaaggaggaactatatccggat

SEQ ID NO: 177 - protein, 550 aa, Artificial Sequence
  Description of Artificial Sequence: Synthetic polypeptide
MGSSHHHHHHSSGLVPRGSHMASMDLDAVRIKVDTVNAKPGDTVNIPVRFSGIPSKGIANCDFVYSYDPNVLEIIEIKPGELIVDPNPTKSFDTAVYPDRKMIVFLFAEDSGTGAYAITKDGVFATIVAKVKEGAPNGLSVIKFVEVGGFANNDLVEQKTQFFDGGVNVGDTTEPATPTTPVTTPTTTDDLDAASMSNSRRRSLRWSWLLSVLAAVGLGLATAPAQAAPPALSQDRFADFPALPLDPSAMVAQVGPQVVNINTKLGYNNAVGAGTGIVIDPNGVVLTNNHVIAGATDINAFSVGSGQTYGVDVVGYDRTQDVAVLQLRGAGGLPSAAIGGGVAVGEPVVAMGNSGGQGGTPRAVPGRVVALGQTVQASDSLTGAEETLNGLIQFDAAIQPGDSGGPVVNGLGQVVGMNTAASDNFQLSQGGQGFAIPIGQAMAIAGQIRSGGGSPTVHIGPTAFLGLGVVDNNGNGARVQRVVGSAPAASLGISTGDVITAVDGAPINSATAMADALNGHHPGDVISVTWQTKSGGTRTGNVTLAEGPPA

SEQ ID NO: 178 - DNA, 7906 bp, Artificial Sequence
  Description of Artificial Sequence: Synthetic polynucleotide
tggcgaatgggacgcgccctgtagcggcgcattaagcgcggcgggtgtggtggttacgcgcagcgtgaccgctacacttgccagcgccctagcgcccgctcctttcgctttcttcccttcctttctcgccacgttcgccggctttccccgtcaagctctaaatcgggggctccctttagggttccgatttagtgctttacggcacctcgaccccaaaaaacttgattagggtgatggttcacgtagtgggccatcgccctgatagacggtttttcgccctttgacgttggagtccacgttctttaatagtggactcttgttccaaactggaacaacactcaaccctatctcggtctattcttttgatttataagggattttgccgatttcggcctattggttaaaaaatgagctgatttaacaaaaatttaacgcgaattttaacaaaatattaacgtttacaatttcaggtggcacttttcggggaaatgtgcgcggaacccctatttgtttatttttctaaatacattcaaatatgtatccgctcatgaattaattcttagaaaaactcatcgagcatcaaatgaaactgcaatttattcatatcaggattatcaataccatatttttgaaaaagccgtttctgtaatgaaggagaaaactcaccgaggcagttccataggatggcaagatcctggtatcggtctgcgattccgactcgtccaacatcaatacaacctattaatttcccctcgtcaaaaataaggttatcaagtgagaaatcaccatgagtgacgactgaatccggtgagaatggcaaaagtttatgcatttctttccagacttgttcaacaggccagccattacgctcgtcatcaaaatcactcgcatcaaccaaaccgttattcattcgtgattgcgcctgagcgagacgaaatacgcgatcgctgttaaaaggacaattacaaacaggaatcgaatgcaaccggcgcaggaacactgccagcgcatcaacaatattttcacctgaatcaggatattcttctaatacctggaatgctgttttcccggggatcgcagtggtgagtaaccatgcatcatcaggagtacggataaaatgcttgatggtcggaagaggcataaattccgtcagccagtttagtctgaccatctcatctgtaacatcattggcaacgctacctttgccatgtttcagaaacaactctggcgcatcgggcttcccatacaatcgatagattgtcgcacctgattgcccgacattatcgcgagcccatttatacccatataaatcagcatccatgttggaatttaatcgcggcctagagcaagacgtttcccgttgaatatggctcataacaccccttgtattactgtttatgtaagcagacagttttattgttcatgaccaaaatcccttaacgtgagttttcgttccactgagcgtcagaccccgtagaaaagatcaaaggatcttcttgagatcctttttttctgcgcgtaatctgctgcttgcaaacaaaaaaaccaccgctaccagcggtggtttgtttgccggatcaagagctaccaactctttttccgaaggtaactggcttcagcagagcgcagataccaaatactgtccttctagtgtagccgtagttaggccaccacttcaagaactctgtagcaccgcctacatacctcgctctgctaatcctgttaccagtggctgctgccagtggcgataagtcgtgtcttaccgggttggactcaagacgatagttaccggataaggcgcagcggtcgggctgaacggggggttcgtgcacacagcccagcttggagcgaacgacctacaccgaactgagatacctacagcgtgagctatgagaaagcgccacgcttcccgaagggagaaaggcggacaggtatccggtaagcggcagggtcggaacaggagagcgcacgagggagcttccagggggaaacgcctggtatctttatagtcctgtcgggtttcgccacctctgacttgagcgtcgatttttgtgatgctcgtcaggggggcggagcctatggaaaaacgccagcaacgcggcctttttacggttcctggccttttgctggccttttgctcacatgttctttcctgcgttatcccctgattctgtggataaccgtattaccgcctttgagtgagctgataccgctcgccgcagccgaacgaccgagcgcagcgagtcagtgagcgaggaagcggaagagcgcctgatgcggtattttctccttacgcatctgtgcggtatttcacaccgcatatatggtgcactctcagtacaatctgctctgatgccgcatagttaagccagtatacactccgctatcgctacgtgactgggtcatggctgcgccccgacacccgccaacacccgctgacgcgccctgacgggcttgtctgctcccggcatccgcttacagacaagctgtgaccgtctccgggagctgcatgtgtcagaggttttcaccgtcatcaccgaaacgcgcgaggcagctgcggtaaagctcatcagcgtggtcgtgaagcgattcacagatgtctgcctgttcatccgcgtccagctcgttgagtttctccagaagcgttaatgtctggcttctgataaagcgggccatgttaagggcggttttttcctgtttggtcactgatgcctccgtgtaagggggatttctgttcatgggggtaatgataccgatgaaacgagagaggatgctcacgatacgggttactgatgatgaacatgcccggttactggaacgttgtgagggtaaacaactggcggtatggatgcggcgggaccagagaaaaatcactcagggtcaatgccagcgcttcgttaatacagatgtaggtgttccacagggtagccagcagcatcctgcgatgcagatccggaacataatggtgcagggcgctgacttccgcgtttccagactttacgaaacacggaaaccgaagaccattcatgttgttgctcaggtcgcagacgttttgcagcagcagtcgcttcacgttcgctcgcgtatcggtgattcattctgctaaccagtaaggcaaccccgccagcctagccgggtcctcaacgacaggagcacgatcatgcgcacccgtggggccgccatgccggcgataatggcctgcttctcgccgaaacgtttggtggcgggaccagtgacgaaggcttgagcgagggcgtgcaagattccgaataccgcaagcgacaggccgatcatcgtcgcgctccagcgaaagcggtcctcgccgaaaatgacccagagcgctgccggcacctgtcctacgagttgcatgataaagaagacagtcataagtgcggcgacgatagtcatgccccgcgcccaccggaaggagctgactgggttgaaggctctcaagggcatcggtcgagatcccggtgcctaatgagtgagctaacttacattaattgcgttgcgctcactgcccgctttccagtcgggaaacctgtcgtgccagctgcattaatgaatcggccaacgcgcggggagaggcggtttgcgtattgggcgccagggtggtttttcttttcaccagtgagacgggcaacagctgattgcccttcaccgcctggccctgagagagttgcagcaagcggtccacgctggtttgccccagcaggcgaaaatcctgtttgatggtggttaacggcgggatataacatgagctgtcttcggtatcgtcgtatcccactaccgagatatccgcaccaacgcgcagcccggactcggtaatggcgcgcattgcgcccagcgccatctgatcgttggcaaccagcatcgcagtgggaacgatgccctcattcagcatttgcatggtttgttgaaaaccggacatggcactccagtcgccttcccgttccgctatcggctgaatttgattgcgagtgagatatttatgccagccagccagacgcagacgcgccgagacagaacttaatgggcccgctaacagcgcgatttgctggtgacccaatgcgaccagatgctccacgcccagtcgcgtaccgtcttcatgggagaaaataatactgttgatgggtgtctggtcagagacatcaagaaataacgccggaacattagtgcaggcagcttccacagcaatggcatcctggtcatccagcggatagttaatgatcagcccactgacgcgttgcgcgagaagattgtgcaccgccgctttacaggcttcgacgccgcttcgttctaccatcgacaccaccacgctggcacccagttgatcggcgcgagatttaatcgccgcgacaatttgcgacggcgcgtgcagggccagactggaggtggcaacgccaatcagcaacgactgtttgcccgccagttgttgtgccacgcggttgggaatgtaattcagctccgccatcgccgcttccactttttcccgcgttttcgcagaaacgtggctggcctggttcaccacgcgggaaacggtctgataagagacaccggcatactctgcgacatcgtataacgttactggtttcacattcaccaccctgaattgactctcttccgggcgctatcatgccataccgcgaaaggttttgcgccattcgatggtgtccgggatctcgacgctctcccttatgcgactcctgcattaggaagcagcccagtagtaggttgaggccgttgagcaccgccgccgcaaggaatggtgcatgcaaggagatggcgcccaacagtcccccggccacggggcctgccaccatacccacgccgaaacaagcgctcatgagcccgaagtggcgagcccgatcttccccatcggtgatgtcggcgatataggcgccagcaaccgcacctgtggcgccggtgatgccggccacgatgcgtccggcgtagaggatcgagatctcgatcccgcgaaattaatacgactcactataggggaattgtgagcggataacaattcccctctagaaataattttgtttaactttaagaaggagatataccatgggcagcagccatcatcatcatcatcacagcagcggcctggtgccgcgcggcagccatatggctagtatggatctggatgcagtaaggattaaagtggacacagtaaatgcaaaaccgggagacacagtaaatatacctgtaagattcagtggtataccatccaagggaatagcaaactgtgactttgtatacagctatgacccgaatgtacttgagataatagagataaaaccgggagaattgatagttgacccgaatcctaccaagagctttgatactgcagtatatcctgacagaaagatgatagtattcctgtttgcggaagacagcggaacaggagcgtatgcaataactaaagacggagtatttgctacgatagtagcgaaagtaaaagaaggagcacctaacgggctcagtgtaatcaaatttgtagaagtaggcggatttgcgaacaatgaccttgtagaacagaagacacagttctttgacggtggagtaaatgttggagatacaacagaacctgcaacacctacaacacctgtaacaacaccgacaacaacagatgatctagatgcagctagcgtgggtgtcagctggccggcgaaagtccggcgccgggatggaacgctggtgccgttcgacatcgcgcggatcgaagcagcggtgacgcgggcagcgcgcgaggtggcttgcgacgaccccgatatgccgggcaccgtagcgaaagccgtcgccgacgcactcgggcgcggtatcgctcccgttgaggacattcaggactgcgtggaggcccggctgggggaagccggtctggatgacgtggcccgtgtttacatcatctaccggcagcggcgcgccgagctgcggacggctaaggccttgctcggcgtgcgggacgagttaaagctgagcttggcggccgtgacggtactgcgcgagcgctatctgctgcacgacgagcagggccggccggccgagtcgaccggcgagctgatggaccgatcggcgcgctgtgtcgcggcggccgaggaccagtatgagccgggctcgtcgaggcggtgggccgagcggttcgccacgctattacgcaacctggaattcctgccgaattcgcccacgttgatgaactctggcaccgacctgggactgctcgccggctgttttgttctgccgattgaggattcgctgcaatcgatctttgcgacgctgggacaggccgccgagctgcagcgggctggaggcggcaccggatatgcgttcagccacctgcgacccgccggggatcgggtggcctccacgggcggcacggccagcggaccggtgtcgtttctacggctgtatgacagtgccgcgggtgtggtctccatgggcggtcgccggcgtggcgcctgtatggctgtgcttgatgtgtcgcacccggatatctgtgatttcgtcaccgccaaggccgaatcccccagcgagctcccgcatttcaacctatcggttggtgtgaccgacgcgttcctgcgggccgtcgaacgcaacggcctacaccggctggtcaatccgcgaaccggcaagatcgtcgcgcggatgcccgccgccgagctgttcgacgccatctgcaaagccgcgcacgccggtggcgatcccgggctggtgtttctcgacacgatcaatagggcaaacccggtgccggggagaggccgcatcgaggcgaccaacccgtgcggggaggtcccactgctgccttacgagtcatgtaatctcggctcgatcaacctcgcccggatgctcgccgacggtcgcgtcgactgggaccggctcgaggaggtcgccggtgtggcggtgcggttccttgatgacgtcatcgatgtcagccgctaccccttccccgaactgggtgaggcggcccgcgccacccgcaagatcgggctgggagtcatgggtttggcggaactgcttgccgcactgggtattccgtacgacagtgaagaagccgtgcggttagccacccggctcatgcgtcgcatacagcaggcggcgcacacggcatcgcggaggctggccgaagagcggggcgcattcccggcgttcaccgatagccggttcgcgcggtcgggcccgaggcgcaacgcacaggtcacctccgtcgctccgacgggcaccatctcactgatcgccggaaccaccgcgggcatcgagccgatgttcgctatcgcgttcacccgcgccatcgtcggccggcatctgctggaggtcaatccgtgcttcgaccgactggcccgcgatcggggcttttatcgtgacgagctgatcgccgagatcgctcagcgtggcggagtccgtggctatccgcggctgcctgctgaggtgcgggccgcgttcccgaccgcggcggagatcgcgccgcagtggcatctgcgcatgcaggccgcggtgcagcgccacgtcgaggccgccgtgtccaagacggtcaacttgcccgccacggcgacggtcgatgacgtccgcgccatctatgtggccgcctggaaggcaaaggtcaagggcatcacggtgtatcgctacggcagccgggaaggacaggtactgtcctacgccgcgccgaaaccgctactggcgcaggctgacacggagttcagcggcggctgtgcgggccgctcctgcgagttctgagcggccgcactcgagcaccaccaccaccaccactgagatccggctgctaacaaagcccgaaaggaagctgagttggctgctgccaccgctgagcaataactagcataaccccttggggcctctaaacgggtcttgaggggttttttgctgaaaggaggaactatatccggat

SEQ ID NO: 179 - protein, 887 aa, Artificial Sequence
  Description of Artificial Sequence: Synthetic polypeptide
MGSSHHHHHHSSGLVPRGSHMASMDLDAVRIKVDTVNAKPGDTVNIPVRFSGIPSKGIANCDFVYSYDPNVLEIIEIKPGELIVDPNPTKSFDTAVYPDRKMIVFLFAEDSGTGAYAITKDGVFATIVAKVKEGAPNGLSVIKFVEVGGFANNDLVEQKTQFFDGGVNVGDTTEPATPTTPVTTPTTTDDLDAASVGVSWPAKVRRRDGTLVPFDIARIEAAVTRAAREVACDDPDMPGTVAKAVADALGRGIAPVEDIQDCVEARLGEAGLDDVARVYIIYRQRRAELRTAKALLGVRDELKLSLAAVTVLRERYLLHDEQGRPAESTGELMDRSARCVAAAEDQYEPGSSRRWAERFATLLRNLEFLPNSPTLMNSGTDLGLLAGCFVLPIEDSLQSIFATLGQAAELQRAGGGTGYAFSHLRPAGDRVASTGGTASGPVSFLRLYDSAAGVVSMGGRRRGACMAVLDVSHPDICDFVTAKAESPSELPHFNLSVGVTDAFLRAVERNGLHRLVNPRTGKIVARMPAAELFDAICKAAHAGGDPGLVFLDTINRANPVPGRGRIEATNPCGEVPLLPYESCNLGSINLARMLADGRVDWDRLEEVAGVAVRFLDDVIDVSRYPFPELGEAARATRKIGLGVMGLAELLAALGIPYDSEEAVRLATRLMRRIQQAAHTASRRLAEERGAFPAFTDSRFARSGPRRNAQVTSVAPTGTISLIAGTTAGIEPMFAIAFTRAIVGRHLLEVNPCFDRLARDRGFYRDELIAEIAQRGGVRGYPRLPAEVRAAFPTAAEIAPQWHLRMQAAVQRHVEAAVSKTVNLPATATVDDVRAIYVAAWKAKVKGITVYRYGSREGQVLSYAAPKPLLAQADTEFSGGCAGRSCEF

SEQ ID NO: 180 - DNA, 6454 bp, Artificial Sequence
  Description of Artificial Sequence: Synthetic polynucleotide
tggcgaatgggacgcgccctgtagcggcgcattaagcgcggcgggtgtggtggttacgcgcagcgtgaccgctacacttgccagcgccctagcgcccgctcctttcgctttcttcccttcctttctcgccacgttcgccggctttccccgtcaagctctaaatcgggggctccctttagggttccgatttagtgctttacggcacctcgaccccaaaaaacttgattagggtgatggttcacgtagtgggccatcgccctgatagacggtttttcgccctttgacgttggagtccacgttctttaatagtggactcttgttccaaactggaacaacactcaaccctatctcggtctattcttttgatttataagggattttgccgatttcggcctattggttaaaaaatgagctgatttaacaaaaatttaacgcgaattttaacaaaatattaacgtttacaatttcaggtggcacttttcggggaaatgtgcgcggaacccctatttgtttatttttctaaatacattcaaatatgtatccgctcatgaattaattcttagaaaaactcatcgagcatcaaatgaaactgcaatttattcatatcaggattatcaataccatatttttgaaaaagccgtttctgtaatgaaggagaaaactcaccgaggcagttccataggatggcaagatcctggtatcggtctgcgattccgactcgtccaacatcaatacaacctattaatttcccctcgtcaaaaataaggttatcaagtgagaaatcaccatgagtgacgactgaatccggtgagaatggcaaaagtttatgcatttctttccagacttgttcaacaggccagccattacgctcgtcatcaaaatcactcgcatcaaccaaaccgttattcattcgtgattgcgcctgagcgagacgaaatacgcgatcgctgttaaaaggacaattacaaacaggaatcgaatgcaaccggcgcaggaacactgccagcgcatcaacaatattttcacctgaatcaggatattcttctaatacctggaatgctgttttcccggggatcgcagtggtgagtaaccatgcatcatcaggagtacggataaaatgcttgatggtcggaagaggcataaattccgtcagccagtttagtctgaccatctcatctgtaacatcattggcaacgctacctttgccatgtttcagaaacaactctggcgcatcgggcttcccatacaatcgatagattgtcgcacctgattgcccgacattatcgcgagcccatttatacccatataaatcagcatccatgttggaatttaatcgcggcctagagcaagacgtttcccgttgaatatggctcataacaccccttgtattactgtttatgtaagcagacagttttattgttcatgaccaaaatcccttaacgtgagttttcgttccactgagcgtcagaccccgtagaaaagatcaaaggatcttcttgagatcctttttttctgcgcgtaatctgctgcttgcaaacaaaaaaaccaccgctaccagcggtggtttgtttgccggatcaagagctaccaactctttttccgaaggtaactggcttcagcagagcgcagataccaaatactgtccttctagtgtagccgtagttaggccaccacttcaagaactctgtagcaccgcctacatacctcgctctgctaatcctgttaccagtggctgctgccagtggcgataagtcgtgtcttaccgggttggactcaagacgatagttaccggataaggcgcagcggtcgggctgaacggggggttcgtgcacacagcccagcttggagcgaacgacctacaccgaactgagatacctacagcgtgagctatgagaaagcgccacgcttcccgaagggagaaaggcggacaggtatccggtaagcggcagggtcggaacaggagagcgcacgagggagcttccagggggaaacgcctggtatctttatagtcctgtcgggtttcgccacctctgacttgagcgtcgatttttgtgatgctcgtcaggggggcggagcctatggaaaaacgccagcaacgcggcctttttacggttcctggccttttgctggccttttgctcacatgttctttcctgcgttatcccctgattctgtggataaccgtattaccgcctttgagtgagctgataccgctcgccgcagccgaacgaccgagcgcagcgagtcagtgagcgaggaagcggaagagcgcctgatgcggtattttctccttacgcatctgtgcggtatttcacaccgcatatatggtgcactctcagtacaatctgctctgatgccgcatagttaagccagtatacactccgctatcgctacgtgactgggtcatggctgcgccccgacacccgccaacacccgctgacgcgccctgacgggcttgtctgctcccggcatccgcttacagacaagctgtgaccgtctccgggagctgcatgtgtcagaggttttcaccgtcatcaccgaaacgcgcgaggcagctgcggtaaagctcatcagcgtggtcgtgaagcgattcacagatgtctgcctgttcatccgcgtccagctcgttgagtttctccagaagcgttaatgtctggcttctgataaagcgggccatgttaagggcggttttttcctgtttggtcactgatgcctccgtgtaagggggatttctgttcatgggggtaatgataccgatgaaacgagagaggatgctcacgatacgggttactgatgatgaacatgcccggttactggaacgttgtgagggtaaacaactggcggtatggatgcggcgggaccagagaaaaatcactcagggtcaatgccagcgcttcgttaatacagatgtaggtgttccacagggtagccagcagcatcctgcgatgcagatccggaacataatggtgcagggcgctgacttccgcgtttccagactttacgaaacacggaaaccgaagaccattcatgttgttgctcaggtcgcagacgttttgcagcagcagtcgcttcacgttcgctcgcgtatcggtgattcattctgctaaccagtaaggcaaccccgccagcctagccgggtcctcaacgacaggagcacgatcatgcgcacccgtggggccgccatgccggcgataatggcctgcttctcgccgaaacgtttggtggcgggaccagtgacgaaggcttgagcgagggcgtgcaagattccgaataccgcaagcgacaggccgatcatcgtcgcgctccagcgaaagcggtcctcgccgaaaatgacccagagcgctgccggcacctgtcctacgagttgcatgataaagaagacagtcataagtgcggcgacgatagtcatgccccgcgcccaccggaaggagctgactgggttgaaggctctcaagggcatcggtcgagatcccggtgcctaatgagtgagctaacttacattaattgcgttgcgctcactgcccgctttccagtcgggaaacctgtcgtgccagctgcattaatgaatcggccaacgcgcggggagaggcggtttgcgtattgggcgccagggtggtttttcttttcaccagtgagacgggcaacagctgattgcccttcaccgcctggccctgagagagttgcagcaagcggtccacgctggtttgccccagcaggcgaaaatcctgtttgatggtggttaacggcgggatataacatgagctgtcttcggtatcgtcgtatcccactaccgagatatccgcaccaacgcgcagcccggactcggtaatggcgcgcattgcgcccagcgccatctgatcgttggcaaccagcatcgcagtgggaacgatgccctcattcagcatttgcatggtttgttgaaaaccggacatggcactccagtcgccttcccgttccgctatcggctgaatttgattgcgagtgagatatttatgccagccagccagacgcagacgcgccgagacagaacttaatgggcccgctaacagcgcgatttgctggtgacccaatgcgaccagatgctccacgcccagtcgcgtaccgtcttcatgggagaaaataatactgttgatgggtgtctggtcagagacatcaagaaataacgccggaacattagtgcaggcagcttccacagcaatggcatcctggtcatccagcggatagttaatgatcagcccactgacgcgttgcgcgagaagattgtgcaccgccgctttacaggcttcgacgccgcttcgttctaccatcgacaccaccacgctggcacccagttgatcggcgcgagatttaatcgccgcgacaatttgcgacggcgcgtgcagggccagactggaggtggcaacgccaatcagcaacgactgtttgcccgccagttgttgtgccacgcggttgggaatgtaattcagctccgccatcgccgcttccactttttcccgcgttttcgcagaaacgtggctggcctggttcaccacgcgggaaacggtctgataagagacaccggcatactctgcgacatcgtataacgttactggtttcacattcaccaccctgaattgactctcttccgggcgctatcatgccataccgcgaaaggttttgcgccattcgatggtgtccgggatctcgacgctctcccttatgcgactcctgcattaggaagcagcccagtagtaggttgaggccgttgagcaccgccgccgcaaggaatggtgcatgcaaggagatggcgcccaacagtcccccggccacggggcctgccaccatacccacgccgaaacaagcgctcatgagcccgaagtggcgagcccgatcttccccatcggtgatgtcggcgatataggcgccagcaaccgcacctgtggcgccggtgatgccggccacgatgcgtccggcgtagaggatcgagatctcgatcccgcgaaattaatacgactcactataggggaattgtgagcggataacaattcccctctagaaataattttgtttaactttaagaaggagatataccatgggcagcagccatcatcatcatcatcacagcagcggcctggtgccgcgcggcagccatatggctagtatggatctggatgcagtaaggattaaagtggacacagtaaatgcaaaaccgggagacacagtaaatatacctgtaagattcagtggtataccatccaagggaatagcaaactgtgactttgtatacagctatgacccgaatgtacttgagataatagagataaaaccgggagaattgatagttgacccgaatcctaccaagagctttgatactgcagtatatcctgacagaaagatgatagtattcctgtttgcggaagacagcggaacaggagcgtatgcaataactaaagacggagtatttgctacgatagtagcgaaagtaaaagaaggagcacctaacgggctcagtgtaatcaaatttgtagaagtaggcggatttgcgaacaatgaccttgtagaacagaagacacagttctttgacggtggagtaaatgttggagatacaacagaacctgcaacacctacaacacctgtaacaacaccgacaacaacagatgatctagatgcagctagcgccgcgcccaagacctactgcgaggagttgaaaggcaccgataccggccaggcgtgccagattcaaatgtccgacccggcctacaacatcaacatcagcctgcccagttactaccccgaccagaagtcgctggaaaattacatcgcccagacgcgcgacaagttcctcagcgcggccacatcgtccactccacgcgaagccccctacgaattgaatatcacctcggccacataccagtccgcgataccgccgcgtggtacgcaggccgtggtgctcaaggtctaccagaacgccggcggcacgcacccaacgaccacgtacaaggccttcgattgggaccaggcctatcgcaagccaatcacctatgacacgctgtggcaggctgacaccgatccgctgccagtcgtcttccccattgtgcaaggtgaactgagcaagcagaccggacaacaggtatcgatagcgccgaatgccggcttggacccggtgaattatcagaacttcgcagtcacgaacgacggggtgattttcttcttcaacccgggggagttgctgcccgaagcagccggcccaacccaggtattggtcccacgttccgcgatcgactcgatgctggccgaattctaggcggccgcactcgagcaccaccaccaccaccactgagatccggctgctaacaaagcccgaaaggaagctgagttggctgctgccaccgctgagcaataactagcataaccccttggggcctctaaacgggtcttgaggggttttttgctgaaaggaggaactatatccggat

SEQ ID NO: 181 - protein, 403 aa, Artificial Sequence
  Description of Artificial Sequence: Synthetic polypeptide
MGSSHHHHHHSSGLVPRGSHMASMDLDAVRIKVDTVNAKPGDTVNIPVRFSGIPSKGIANCDFVYSYDPNVLEIIEIKPGELIVDPNPTKSFDTAVYPDRKMIVFLFAEDSGTGAYAITKDGVFATIVAKVKEGAPNGLSVIKFVEVGGFANNDLVEQKTQFFDGGVNVGDTTEPATPTTPVTTPTTTDDLDAASAAPKTYCEELKGTDTGQACQIQMSDPAYNINISLPSYYPDQKSLENYIAQTRDKFLSAATSSTPREAPYELNITSATYQSAIPPRGTQAVVLKVYQNAGGTHPTTTYKAFDWDQAYRKPITYDTLWQADTDPLPVVFPIVQGELSKQTGQQVSIAPNAGLDPVNYQNFAVTNDGVIFFFNPGELLPEAAGPTQVLVPRSAIDSMLAEF

SEQ ID NO: 182 - DNA, 6445 bp, Artificial Sequence
  Description of Artificial Sequence: Synthetic polynucleotide
tggcgaatgggacgcgccctgtagcggcgcattaagcgcggcgggtgtggtggttacgcgcagcgtgaccgctacacttgccagcgccctagcgcccgctcctttcgctttcttcccttcctttctcgccacgttcgccggctttccccgtcaagctctaaatcgggggctccctttagggttccgatttagtgctttacggcacctcgaccccaaaaaacttgattagggtgatggttcacgtagtgggccatcgccctgatagacggtttttcgccctttgacgttggagtccacgttctttaatagtggactcttgttccaaactggaacaacactcaaccctatctcggtctattcttttgatttataagggattttgccgatttcggcctattggttaaaaaatgagctgatttaacaaaaatttaacgcgaattttaacaaaatattaacgtttacaatttcaggtggcacttttcggggaaatgtgcgcggaacccctatttgtttatttttctaaatacattcaaatatgtatccgctcatgaattaattcttagaaaaactcatcgagcatcaaatgaaactgcaatttattcatatcaggattatcaataccatatttttgaaaaagccgtttctgtaatgaaggagaaaactcaccgaggcagttccataggatggcaagatcctggtatcggtctgcgattccgactcgtccaacatcaatacaacctattaatttcccctcgtcaaaaataaggttatcaagtgagaaatcaccatgagtgacgactgaatccggtgagaatggcaaaagtttatgcatttctttccagacttgttcaacaggccagccattacgctcgtcatcaaaatcactcgcatcaaccaaaccgttattcattcgtgattgcgcctgagcgagacgaaatacgcgatcgctgttaaaaggacaattacaaacaggaatcgaatgcaaccggcgcaggaacactgccagcgcatcaacaatattttcacctgaatcaggatattcttctaatacctggaatgctgttttcccggggatcgcagtggtgagtaaccatgcatcatcaggagtacggataaaatgcttgatggtcggaagaggcataaattccgtcagccagtttagtctgaccatctcatctgtaacatcattggcaacgctacctttgccatgtttcagaaacaactctggcgcatcgggcttcccatacaatcgatagattgtcgcacctgattgcccgacattatcgcgagcccatttatacccatataaatcagcatccatgttggaatttaatcgcggcctagagcaagacgtttcccgttgaatatggctcataacaccccttgtattactgtttatgtaagcagacagttttattgttcatgaccaaaatcccttaacgtgagttttcgttccactgagcgtcagaccccgtagaaaagatcaaaggatcttcttgagatcctttttttctgcgcgtaatctgctgcttgcaaacaaaaaaaccaccgctaccagcggtggtttgtttgccggatcaagagctaccaactctttttccgaaggtaactggcttcagcagagcgcagataccaaatactgtccttctagtgtagccgtagttaggccaccacttcaagaactctgtagcaccgcctacatacctcgctctgctaatcctgttaccagtggctgctgccagtggcgataagtcgtgtcttaccgggttggactcaagacgatagttaccggataaggcgcagcggtcgggctgaacggggggttcgtgcacacagcccagcttggagcgaacgacctacaccgaactgagatacctacagcgtgagctatgagaaagcgccacgcttcccgaagggagaaaggcggacaggtatccggtaagcggcagggtcggaacaggagagcgcacgagggagcttccagggggaaacgcctggtatctttatagtcctgtcgggtttcgccacctctgacttgagcgtcgatttttgtgatgctcgtcaggggggcggagcctatggaaaaacgccagcaacgcggcctttttacggttcctggccttttgctggccttttgctcacatgttctttcctgcgttatcccctgattctgtggataaccgtattaccgcctttgagtgagctgataccgctcgccgcagccgaacgaccgagcgcagcgagtcagtgagcgaggaagcggaagagcgcctgatgcggtattttctccttacgcatctgtgcggtatttcacaccgcatatatggtgcactctcagtacaatctgctctgatgccgcatagttaagccagtatacactccgctatcgctacgtgactgggtcatggctgcgccccgacacccgccaacacccgctgacgcgccctgacgggcttgtctgctcccggcatccgcttacagacaagctgtgaccgtctccgggagctgcatgtgtcagaggttttcaccgtcatcaccgaaacgcgcgaggcagctgcggtaaagctcatcagcgtggtcgtgaagcgattcacagatgtctgcctgttcatccgcgtccagctcgttgagtttctccagaagcgttaatgtctggcttctgataaagcgggccatgttaagggcggttttttcctgtttggtcactgatgcctccgtgtaagggggatttctgttcatgggggtaatgataccgatgaaacgagagaggatgctcacgatacgggttactgatgatgaacatgcccggttactggaacgttgtgagggtaaacaactggcggtatggatgcggcgggaccagagaaaaatcactcagggtcaatgccagcgcttcgttaatacagatgtaggtgttccacagggtagccagcagcatcctgcgatgcagatccggaacataatggtgcagggcgctgacttccgcgtttccagactttacgaaacacggaaaccgaagaccattcatgttgttgctcaggtcgcagacgttttgcagcagcagtcgcttcacgttcgctcgcgtatcggtgattcattctgctaaccagtaaggcaaccccgccagcctagccgggtcctcaacgacaggagcacgatcatgcgcacccgtggggccgccatgccggcgataatggcctgcttctcgccgaaacgtttggtggcgggaccagtgacgaaggcttgagcgagggcgtgcaagattccgaataccgcaagcgacaggccgatcatcgtcgcgctccagcgaaagcggtcctcgccgaaaatgacccagagcgctgccggcacctgtcctacgagttgcatgataaagaagacagtcataagtgcggcgacgatagtcatgccccgcgcccaccggaaggagctgactgggttgaaggctctcaagggcatcggtcgagatcccggtgcctaatgagtgagctaacttacattaattgcgttgcgctcactgcccgctttccagtcgggaaacctgtcgtgccagctgcattaatgaatcggccaacgcgcggggagaggcggtttgcgtattgggcgccagggtggtttttcttttcaccagtgagacgggcaacagctgattgcccttcaccgcctggccctgagagagttgcagcaagcggtccacgctggtttgccccagcaggcgaaaatcctgtttgatggtggttaacggcgggatataacatgagctgtcttcggtatcgtcgtatcccactaccgagatatccgcaccaacgcgcagcccggactcggtaatggcgcgcattgcgcccagcgccatctgatcgttggcaaccagcatcgcagtgggaacgatgccctcattcagcatttgcatggtttgttgaaaaccggacatggcactccagtcgccttcccgttccgctatcggctgaatttgattgcgagtgagatatttatgccagccagccagacgcagacgcgccgagacagaacttaatgggcccgctaacagcgcgatttgctggtgacccaatgcgaccagatgctccacgcccagtcgcgtaccgtcttcatgggagaaaataatactgttgatgggtgtctggtcagagacatcaagaaataacgccggaacattagtgcaggcagcttccacagcaatggcatcctggtcatccagcggatagttaatgatcagcccactgacgcgttgcgcgagaagattgtgcaccgccgctttacaggcttcgacgccgcttcgttctaccatcgacaccaccacgctggcacccagttgatcggcgcgagatttaatcgccgcgacaatttgcgacggcgcgtgcagggccagactggaggtggcaacgccaatcagcaacgactgtttgcccgccagttgttgtgccacgcggttgggaatgtaattcagctccgccatcgccgcttccactttttcccgcgttttcgcagaaacgtggctggcctggttcaccacgcgggaaacggtctgataagagacaccggcatactctgcgacatcgtataacgttactggtttcacattcaccaccctgaattgactctcttccgggcgctatcatgccataccgcgaaaggttttgcgccattcgatggtgtccgggatctcgacgctctcccttatgcgactcctgcattaggaagcagcccagtagtaggttgaggccgttgagcaccgccgccgcaaggaatggtgcatgcaaggagatggcgcccaacagtcccccggccacggggcctgccaccatacccacgccgaaacaagcgctcatgagcccgaagtggcgagcccgatcttccccatcggtgatgtcggcgatataggcgccagcaaccgcacctgtggcgccggtgatgccggccacgatgcgtccggcgtagaggatcgagatctcgatcccgcgaaattaatacgactcactataggggaattgtgagcggataacaattcccctctagaaataattttgtttaactttaagaaggagatataccatgggcagcagccatcatcatcatcatcacagcagcggcctggtgccgcgcggcagccatatggctagtatggatctggatgcagtaaggattaaagtggacacagtaaatgcaaaaccgggagacacagtaaatatacctgtaagattcagtggtataccatccaagggaatagcaaactgtgactttgtatacagctatgacccgaatgtacttgagataatagagataaaaccgggagaattgatagttgacccgaatcctaccaagagctttgatactgcagtatatcctgacagaaagatgatagtattcctgtttgcggaagacagcggaacaggagcgtatgcaataactaaagacggagtatttgctacgatagtagcgaaagtaaaagaaggagcacctaacgggctcagtgtaatcaaatttgtagaagtaggcggatttgcgaacaatgaccttgtagaacagaagacacagttctttgacggtggagtaaatgttggagatacaacagaacctgcaacacctacaacacctgtaacaacaccgacaacaacagatgatctagatgcagctagctgcagctgtatggctgaaaactcgaacattgatgacatcaaggctccgttgcttgccgcgcttggagcggccgacctggccttggccactgtcaacgagttgatcacgaacctgcgtgagcgtgcggaggagactcgtacggacacccgcagccgggtcgaggagagccgtgctcgcctgaccaagctgcaggaagatctgcccgagcagctcaccgagctgcgtgagaagttcaccgccgaggagctgcgtaaggccgccgagggctacctcgaggccgcgactagccggtacaacgagctggtcgagcgcggtgaggccgctctagagcggctgcgcagccagcagagcttcgaggaagtgtcggcgcgcgccgaaggctacgtggaccaggcggtggagttgacccaggaggcgttgggtacggtcgcatcgcagacccgcgcggtcggtgagcgtgccgccaagctggtcggcatcgagctgcctaagaaggctgctccggccaagaaggccgctccggccaagaaggccgctccggccaagaaggcggcggccaagaaggcgcccgcgaagaaggcggcggccaagaaggtcacccagaagtgcagctgttaggcggccgcactcgagcaccaccaccaccaccactgagatccggctgctaacaaagcccgaaaggaagctgagttggctgctgccaccgctgagcaataactagcataaccccttggggcctctaaacgggtcttgaggggttttttgctgaaaggaggaactatatccggat

SEQ ID NO: 183 - protein, 400 aa, Artificial Sequence
  Description of Artificial Sequence: Synthetic polypeptide
MGSSHHHHHHSSGLVPRGSHMASMDLDAVRIKVDTVNAKPGDTVNIPVRFSGIPSKGIANCDFVYSYDPNVLEIIEIKPGELIVDPNPTKSFDTAVYPDRKMIVFLFAEDSGTGAYAITKDGVFATIVAKVKEGAPNGLSVIKFVEVGGFANNDLVEQKTQFFDGGVNVGDTTEPATPTTPVTTPTTTDDLDAASCSCMAENSNIDDIKAPLLAALGAADLALATVNELITNLRERAEETRTDTRSRVEESRARLTKLQEDLPEQLTELREKFTAEELRKAAEGYLEAATSRYNELVERGEAALERLRSQQSFEEVSARAEGYVDQAVELTQEALGTVASQTRAVGERAAKLVGIELPKKAAPAKKAAPAKKAAPAKKAAAKKAPAKKAAAKKVTQKCSC

SEQ ID NO: 184 - DNA, 6118 bp, Artificial Sequence
  Description of Artificial Sequence: Synthetic polynucleotide
tggcgaatgggacgcgccctgtagcggcgcattaagcgcggcgggtgtggtggttacgcgcagcgtgaccgctacacttgccagcgccctagcgcccgctcctttcgctttcttcccttcctttctcgccacgttcgccggctttccccgtcaagctctaaatcgggggctccctttagggttccgatttagtgctttacggcacctcgaccccaaaaaacttgattagggtgatggttcacgtagtgggccatcgccctgatagacggtttttcgccctttgacgttggagtccacgttctttaatagtggactcttgttccaaactggaacaacactcaaccctatctcggtctattcttttgatttataagggattttgccgatttcggcctattggttaaaaaatgagctgatttaacaaaaatttaacgcgaattttaacaaaatattaacgtttacaatttcaggtggcacttttcggggaaatgtgcgcggaacccctatttgtttatttttctaaatacattcaaatatgtatccgctcatgaattaattcttagaaaaactcatcgagcatcaaatgaaactgcaatttattcatatcaggattatcaataccatatttttgaaaaagccgtttctgtaatgaaggagaaaactcaccgaggcagttccataggatggcaagatcctggtatcggtctgcgattccgactcgtccaacatcaatacaacctattaatttcccctcgtcaaaaataaggttatcaagtgagaaatcaccatgagtgacgactgaatccggtgagaatggcaaaagtttatgcatttctttccagacttgttcaacaggccagccattacgctcgtcatcaaaatcactcgcatcaaccaaaccgttattcattcgtgattgcgcctgagcgagacgaaatacgcgatcgctgttaaaaggacaattacaaacaggaatcgaatgcaaccggcgcaggaacactgccagcgcatcaacaatattttcacctgaatcaggatattcttctaatacctggaatgctgttttcccggggatcgcagtggtgagtaaccatgcatcatcaggagtacggataaaatgcttgatggtcggaagaggcataaattccgtcagccagtttagtctgaccatctcatctgtaacatcattggcaacgctacctttgccatgtttcagaaacaactctggcgcatcgggcttcccatacaatcgatagattgtcgcacctgattgcccgacattatcgcgagcccatttatacccatataaatcagcatccatgttggaatttaatcgcggcctagagcaagacgtttcccgttgaatatggctcataacaccccttgtattactgtttatgtaagcagacagttttattgttcatgaccaaaatcccttaacgtgagttttcgttccactgagcgtcagaccccgtagaaaagatcaaaggatcttcttgagatcctttttttctgcgcgtaatctgctgcttgcaaacaaaaaaaccaccgctaccagcggtggtttgtttgccggatcaagagctaccaactctttttccgaaggtaactggcttcagcagagcgcagataccaaatactgtccttctagtgtagccgtagttaggccaccacttcaagaactctgtagcaccgcctacatacctcgctctgctaatcctgttaccagtggctgctgccagtggcgataagtcgtgtcttaccgggttggactcaagacgatagttaccggataaggcgcagcggtcgggctgaacggggggttcgtgcacacagcccagcttggagcgaacgacctacaccgaactgagatacctacagcgtgagctatgagaaagcgccacgcttcccgaagggagaaaggcggacaggtatccggtaagcggcagggtcggaacaggagagcgcacgagggagcttccagggggaaacgcctggtatctttatagtcctgtcgggtttcgccacctctgacttgagcgtcgatttttgtgatgctcgtcaggggggcggagcctatggaaaaacgccagcaacgcggcctttttacggttcctggccttttgctggccttttgctcacatgttctttcctgcgttatcccctgattctgtggataaccgtattaccgcctttgagtgagctgataccgctcgccgcagccgaacgaccgagcgcagcgagtcagtgagcgaggaagcggaagagcgcctgatgcggtattttctccttacgcatctgtgcggtatttcacaccgcatatatggtgcactctcagtacaatctgctctgatgccgcatagttaagccagtatacactccgctatcgctacgtgactgggtcatggctgcgccccgacacccgccaacacccgctgacgcgccctgacgggcttgtctgctcccggcatccgcttacagacaagctgtgaccgtctccgggagctgcatgtgtcagaggttttcaccgtcatcaccgaaacgcgcgaggcagctgcggtaaagctcatcagcgtggtcgtgaagcgattcacagatgtctgcctgttcatccgcgtccagctcgttgagtttctccagaagcgttaatgtctggcttctgataaagcgggccatgttaagggcggttttttcctgtttggtcactgatgcctccgtgtaagggggatttctgttcatgggggtaatgataccgatgaaacgagagaggatgctcacgatacgggttactgatgatgaacatgcccggttactggaacgttgtgagggtaaacaactggcggtatggatgcggcgggaccagagaaaaatcactcagggtcaatgccagcgcttcgttaatacagatgtaggtgttccacagggtagccagcagcatcctgcgatgcagatccggaacataatggtgcagggcgctgacttccgcgtttccagactttacgaaacacggaaaccgaagaccattcatgttgttgctcaggtcgcagacgttttgcagcagcagtcgcttcacgttcgctcgcgtatcggtgattcattctgctaaccagtaaggcaaccccgccagcctagccgggtcctcaacgacaggagcacgatcatgcgcacccgtggggccgccatgccggcgataatggcctgcttctcgccgaaacgtttggtggcgggaccagtgacgaaggcttgagcgagggcgtgcaagattccgaataccgcaagcgacaggccgatcatcgtcgcgctccagcgaaagcggtcctcgccgaaaatgacccagagcgctgccggcacctgtcctacgagttgcatgataaagaagacagtcataagtgcggcgacgatagtcatgccccgcgcccaccggaaggagctgactgggttgaaggctctcaagggcatcggtcgagatcccggtgcctaatgagtgagctaacttacattaattgcgttgcgctcactgcccgctttccagtcgggaaacctgtcgtgccagctgcattaatgaatcggccaacgcgcggggagaggcggtttgcgtattgggcgccagggtggtttttcttttcaccagtgagacgggcaacagctgattgcccttcaccgcctggccctgagagagttgcagcaagcggtccacgctggtttgccccagcaggcgaaaatcctgtttgatggtggttaacggcgggatataacatgagctgtcttcggtatcgtcgtatcccactaccgagatatccgcaccaacgcgcagcccggactcggtaatggcgcgcattgcgcccagcgccatctgatcgttggcaaccagcatcgcagtgggaacgatgccctcattcagcatttgcatggtttgttgaaaaccggacatggcactccagtcgccttcccgttccgctatcggctgaatttgattgcgagtgagatatttatgccagccagccagacgcagacgcgccgagacagaacttaatgggcccgctaacagcgcgatttgctggtgacccaatgcgaccagatgctccacgcccagtcgcgtaccgtcttcatgggagaaaataatactgttgatgggtgtctggtcagagacatcaagaaataacgccggaacattagtgcaggcagcttccacagcaatggcatcctggtcatccagcggatagttaatgatcagcccactgacgcgttgcgcgagaagattgtgcaccgccgctttacaggcttcgacgccgcttcgttctaccatcgacaccaccacgctggcacccagttgatcggcgcgagatttaatcgccgcgacaatttgcgacggcgcgtgcagggccagactggaggtggcaacgccaatcagcaacgactgtttgcccgccagttgttgtgccacgcggttgggaatgtaattcagctccgccatcgccgcttccactttttcccgcgttttcgcagaaacgtggctggcctggttcaccacgcgggaaacggtctgataagagacaccggcatactctgcgacatcgtataacgttactggtttcacattcaccaccctgaattgactctcttccgggcgctatcatgccataccgcgaaaggttttgcgccattcgatggtgtccgggatctcgacgctctcccttatgcgactcctgcattaggaagcagcccagtagtaggttgaggccgttgagcaccgccgccgcaaggaatggtgcatgcaaggagatggcgcccaacagtcccccggccacggggcctgccaccatacccacgccgaaacaagcgctcatgagcccgaagtggcgagcccgatcttccccatcggtgatgtcggcgatataggcgccagcaaccgcacctgtggcgccggtgatgccggccacgatgcgtccggcgtagaggatcgagatctcgatcccgcgaaattaatacgactcactataggggaattgtgagcggataacaattcccctctagaaataattttgtttaactttaagaaggagatataccatgggcagcagccatcatcatcatcatcacagcagcggcctggtgccgcgcggcagccatatggctagtatggatctggatgcagtaaggattaaagtggacacagtaaatgcaaaaccgggagacacagtaaatatacctgtaagattcagtggtataccatccaagggaatagcaaactgtgactttgtatacagctatgacccgaatgtacttgagataatagagataaaaccgggagaattgatagttgacccgaatcctaccaagagctttgatactgcagtatatcctgacagaaagatgatagtattcctgtttgcggaagacagcggaacaggagcgtatgcaataactaaagacggagtatttgctacgatagtagcgaaagtaaaagaaggagcacctaacgggctcagtgtaatcaaatttgtagaagtaggcggatttgcgaacaatgaccttgtagaacagaagacacagttctttgacggtggagtaaatgttggagatacaacagaacctgcaacacctacaacacctgtaacaacaccgacaacaacagatgatctagatgcagctagcatgtcgcaaatcatgtacaactaccccgcgatgttgggtcacgccggggatatggccggatatgccggcacgctgcagagcttgggtgccgagatcgccgtggagcaggccgcgttgcagagtgcgtggcagggcgataccgggatcacgtatcaggcgtggcaggcacagtggaaccaggccatggaagatttggtgcgggcctatcatgcgatgtccagcacccatgaagccaacaccatggcgatgatggcccgcgacacggccgaagccgccaaatggggcggctaggcggccgcactcgagcaccaccaccaccaccactgagatccggctgctaacaaagcccgaaaggaagctgagttggctgctgccaccgctgagcaataactagcataaccccttggggcctctaaacgggtcttgaggggttttttgctgaaaggaggaactatatccggat

SEQ ID NO: 185 - protein, 291 aa, Artificial Sequence
  Description of Artificial Sequence: Synthetic polypeptide
MGSSHHHHHHSSGLVPRGSHMASMDLDAVRIKVDTVNAKPGDTVNIPVRFSGIPSKGIANCDFVYSYDPNVLEIIEIKPGELIVDPNPTKSFDTAVYPDRKMIVFLFAEDSGTGAYAITKDGVFATIVAKVKEGAPNGLSVIKFVEVGGFANNDLVEQKTQFFDGGVNVGDTTEPATPTTPVTTPTTTDDLDAASMSQIMYNYPAMLGHAGDMAGYAGTLQSLGAEIAVEQAALQSAWQGDTGITYQAWQAQWNQAMEDLVRAYHAMSSTHEANTMAMMARDTAEAAKWGG

SEQ ID NO: 186 - DNA, 6682 bp, Artificial Sequence
  Description of Artificial Sequence: Synthetic polynucleotide
tggcgaatgggacgcgccctgtagcggcgcattaagcgcggcgggtgtggtggttacgcgcagcgtgaccgctacacttgccagcgccctagcgcccgctcctttcgctttcttcccttcctttctcgccacgttcgccggctttccccgtcaagctctaaatcgggggctccctttagggttccgatttagtgctttacggcacctcgaccccaaaaaacttgattagggtgatggttcacgtagtgggccatcgccctgatagacggtttttcgccctttgacgttggagtccacgttctttaatagtggactcttgttccaaactggaacaacactcaaccctatctcggtctattcttttgatttataagggattttgccgatttcggcctattggttaaaaaatgagctgatttaacaaaaatttaacgcgaattttaacaaaatattaacgtttacaatttcaggtggcacttttcggggaaatgtgcgcggaacccctatttgtttatttttctaaatacattcaaatatgtatccgctcatgaattaattcttagaaaaactcatcgagcatcaaatgaaactgcaatttattcatatcaggattatcaataccatatttttgaaaaagccgtttctgtaatgaaggagaaaactcaccgaggcagttccataggatggcaagatcctggtatcggtctgcgattccgactcgtccaacatcaatacaacctattaatttcccctcgtcaaaaataaggttatcaagtgagaaatcaccatgagtgacgactgaatccggtgagaatggcaaaagtttatgcatttctttccagacttgttcaacaggccagccattacgctcgtcatcaaaatcactcgcatcaaccaaaccgttattcattcgtgattgcgcctgagcgagacgaaatacgcgatcgctgttaaaaggacaattacaaacaggaatcgaatgcaaccggcgcaggaacactgccagcgcatcaacaatattttcacctgaatcaggatattcttctaatacctggaatgctgttttcccggggatcgcagtggtgagtaaccatgcatcatcaggagtacggataaaatgcttgatggtcggaagaggcataaattccgtcagccagtttagtctgaccatctcatctgtaacatcattggcaacgctacctttgccatgtttcagaaacaactctggcgcatcgggcttcccatacaatcgatagattgtcgcacctgattgcccgacattatcgcgagcccatttatacccatataaatcagcatccatgttggaatttaatcgcggcctagagcaagacgtttcccgttgaatatggctcataacaccccttgtattactgtttatgtaagcagacagttttattgttcatgaccaaaatcccttaacgtgagttttcgttccactgagcgtcagaccccgtagaaaagatcaaaggatcttcttgagatcctttttttctgcgcgtaatctgctgcttgcaaacaaaaaaaccaccgctaccagcggtggtttgtttgccggatcaagagctaccaactctttttccgaaggtaactggcttcagcagagcgcagataccaaatactgtccttctagtgtagccgtagttaggccaccacttcaagaactctgtagcaccgcctacatacctcgctctgctaatcctgttaccagtggctgctgccagtggcgataagtcgtgtcttaccgggttggactcaagacgatagttaccggataaggcgcagcggtcgggctgaacggggggttcgtgcacacagcccagcttggagcgaacgacctacaccgaactgagatacctacagcgtgagctatgagaaagcgccacgcttcccgaagggagaaaggcggacaggtatccggtaagcggcagggtcggaacaggagagcgcacgagggagcttccagggggaaacgcctggtatctttatagtcctgtcgggtttcgccacctctgacttgagcgtcgatttttgtgatgctcgtcaggggggcggagcctatggaaaaacgccagcaacgcggcctttttacggttcctggccttttgctggccttttgctcacatgttctttcctgcgttatcccctgattctgtggataaccgtattaccgcctttgagtgagctgataccgctcgccgcagccgaacgaccgagcgcagcgagtcagtgagcgaggaagcggaagagcgcctgatgcggtattttctccttacgcatctgtgcggtatttcacaccgcatatatggtgcactctcagtacaatctgctctgatgccgcatagttaagccagtatacactccgctatcgctacgtgactgggtcatggctgcgccccgacacccgccaacacccgctgacgcgccctgacgggcttgtctgctcccggcatccgcttacagacaagctgtgaccgtctccgggagctgcatgtgtcagaggttttcaccgtcatcaccgaaacgcgcgaggcagctgcggtaaagctcatcagcgtggtcgtgaagcgattcacagatgtctgcctgttcatccgcgtccagctcgttgagtttctccagaagcgttaatgtctggcttctgataaagcgggccatgttaagggcggttttttcctgtttggtcactgatgcctccgtgtaagggggatttctgttcatgggggtaatgataccgatgaaacgagagaggatgctcacgatacgggttactgatgatgaacatgcccggttactggaacgttgtgagggtaaacaactggcggtatggatgcggcgggaccagagaaaaatcactcagggtcaatgccagcgcttcgttaatacagatgtaggtgttccacagggtagccagcagcatcctgcgatgcagatccggaacataatggtgcagggcgctgacttccgcgtttccagactttacgaaacacggaaaccgaagaccattcatgttgttgctcaggtcgcagacgttttgcagcagcagtcgcttcacgttcgctcgcgtatcggtgattcattctgctaaccagtaaggcaaccccgccagcctagccgggtcctcaacgacaggagcacgatcatgcgcacccgtggggccgccatgccggcgataatggcctgcttctcgccgaaacgtttggtggcgggaccagtgacgaaggcttgagcgagggcgtgcaagattccgaataccgcaagcgacaggccgatcatcgtcgcgctccagcgaaagcggtcctcgccgaaaatgacccagagcgctgccggcacctgtcctacgagttgcatgataaagaagacagtcataagtgcggcgacgatagtcatgccccgcgcccaccggaaggagctgactgggttgaaggctctcaagggcatcggtcgagatcccggtgcctaatgagtgagctaacttacattaattgcgttgcgctcactgcccgctttccagtcgggaaacctgtcgtgccagctgcattaatgaatcggccaacgcgcggggagaggcggtttgcgtattgggcgccagggtggtttttcttttcaccagtgagacgggcaacagctgattgcccttcaccgcctggccctgagagagttgcagcaagcggtccacgctggtttgccccagcaggcgaaaatcctgtttgatggtggttaacggcgggatataacatgagctgtcttcggtatcgtcgtatcccactaccgagatatccgcaccaacgcgcagcccggactcggtaatggcgcgcattgcgcccagcgccatctgatcgttggcaaccagcatcgcagtgggaacgatgccctcattcagcatttgcatggtttgttgaaaaccggacatggcactccagtcgccttcccgttccgctatcggctgaatttgattgcgagtgagatatttatgccagccagccagacgcagacgcgccgagacagaacttaatgggcccgctaacagcgcgatttgctggtgacccaatgcgaccagatgctccacgcccagtcgcgtaccgtcttcatgggagaaaataatactgttgatgggtgtctggtcagagacatcaagaaataacgccggaacattagtgcaggcagcttccacagcaatggcatcctggtcatccagcggatagttaatgatcagcccactgacgcgttgcgcgagaagattgtgcaccgccgctttacaggcttcgacgccgcttcgttctaccatcgacaccaccacgctggcacccagttgatcggcgcgagatttaatcgccgcgacaatttgcgacggcgcgtgcagggccagactggaggtggcaacgccaatcagcaacgactgtttgcccgccagttgttgtgccacgcggttgggaatgtaattcagctccgccatcgccgcttccactttttcccgcgttttcgcagaaacgtggctggcctggttcaccacgcgggaaacggtctgataagagacaccggcatactctgcgacatcgtataacgttactggtttcacattcaccaccctgaattgactctcttccgggcgctatcatgccataccgcgaaaggttttgcgccattcgatggtgtccgggatctcgacgctctcccttatgcgactcctgcattaggaagcagcccagtagtaggttgaggccgttgagcaccgccgccgcaaggaatggtgcatgcaaggagatggcgcccaacagtcccccggccacggggcctgccaccatacccacgccgaaacaagcgctcatgagcccgaagtggcgagcccgatcttccccatcggtgatgtcggcgatataggcgccagcaaccgcacctgtggcgccggtgatgccggccacgatgcgtccggcgtagaggatcgagatctcgatcccgcgaaattaatacgactcactataggggaattgtgagcggataacaattcccctctagaaataattttgtttaactttaagaaggagatataccatgggcagcagccatcatcatcatcatcacagcagcggcctggtgccgcgcggcagccatatggctagtatggatctggatgcagtaaggattaaagtggacacagtaaatgcaaaaccgggagacacagtaaatatacctgtaagattcagtggtataccatccaagggaatagcaaactgtgactttgtatacagctatgacccgaatgtacttgagataatagagataaaaccgggagaattgatagttgacccgaatcctaccaagagctttgatactgcagtatatcctgacagaaagatgatagtattcctgtttgcggaagacagcggaacaggagcgtatgcaataactaaagacggagtatttgctacgatagtagcgaaagtaaaagaaggagcacctaacgggctcagtgtaatcaaatttgtagaagtaggcggatttgcgaacaatgaccttgtagaacagaagacacagttctttgacggtggagtaaatgttggagatacaacagaacctgcaacacctacaacacctgtaacaacaccgacaacaacagatgatctagatgcagctagctcccggccggggctgccggtcgagtacctgcaggtgccgtcgccgtcgatgggccgcgacatcaaggttcagttccagagcggtgggaacaactcacctgcggtttatctgctcgacggcctgcgcgcccaagacgactacaacggctgggatatcaacaccccggcgttcgagtggtactaccagtcgggactgtcgatagtcatgccggtcggcgggcagtccagcttctacagcgactggtacagcccggcctgcggtaaggctggctgccagacttacaagtgggaaaccttcctgaccagcgagctgccgcaatggttgtccgccaacagggccgtgaagcccaccggcagcgctgcaatcggcttgtcgatggccggctcgtcggcaatgatcttggccgcctaccacccccagcagttcatctacgccggctcgctgtcggccctgctggacccctctcaggggatggggcctagcctgatcggcctcgcgatgggtgacgccggcggttacaaggccgcagacatgtggggtccctcgagtgacccggcatgggagcgcaacgaccctacgcagcagatccccaagctggtcgcaaacaacacccggctatgggtttattgcgggaacggcaccccgaacgagttgggcggtgccaacatacccgccgagttcttggagaacttcgttcgtagcagcaacctgaagttccaggatgcgtacaacgccgcgggcgggcacaacgccgtgttcaacttcccgcccaacggcacgcacagctgggagtactggggcgctcagctcaacgccatgaagggtgacctgcagagttcgttaggcgccggctgagcggccgcactcgagcaccaccaccaccaccactgagatccggctgctaacaaagcccgaaaggaagctgagttggctgctgccaccgctgagcaataactagcataaccccttggggcctctaaacgggtcttgaggggttttttgctgaaaggaggaactatatccggat

SEQ ID NO: 187 - protein, 479 aa, Artificial Sequence
  Description of Artificial Sequence: Synthetic polypeptide
MGSSHHHHHHSSGLVPRGSHMASMDLDAVRIKVDTVNAKPGDTVNIPVRFSGIPSKGIANCDFVYSYDPNVLEIIEIKPGELIVDPNPTKSFDTAVYPDRKMIVFLFAEDSGTGAYAITKDGVFATIVAKVKEGAPNGLSVIKFVEVGGFANNDLVEQKTQFFDGGVNVGDTTEPATPTTPVTTPTTTDDLDAASSRPGLPVEYLQVPSPSMGRDIKVQFQSGGNNSPAVYLLDGLRAQDDYNGWDINTPAFEWYYQSGLSIVMPVGGQSSFYSDWYSPACGKAGCQTYKWETFLTSELPQWLSANRAVKPTGSAAIGLSMAGSSAMILAAYHPQQFIYAGSLSALLDPSQGMGPSLIGLAMGDAGGYKAADMWGPSSDPAWERNDPTQQIPKLVANNTRLWVYCGNGTPNELGGANIPAEFLENFVRSSNLKFQDAYNAAGGHNAVFNFPPNGTHSWEYWGAQLNAMKGDLQSSLGAG

SEQ ID NO: 188 - DNA, 6130 bp, Artificial Sequence
  Description of Artificial Sequence: Synthetic polynucleotide
tggcgaatgggacgcgccctgtagcggcgcattaagcgcggcgggtgtggtggttacgcgcagcgtgaccgctacacttgccagcgccctagcgcccgctcctttcgctttcttcccttcctttctcgccacgttcgccggctttccccgtcaagctctaaatcgggggctccctttagggttccgatttagtgctttacggcacctcgaccccaaaaaacttgattagggtgatggttcacgtagtgggccatcgccctgatagacggtttttcgccctttgacgttggagtccacgttctttaatagtggactcttgttccaaactggaacaacactcaaccctatctcggtctattcttttgatttataagggattttgccgatttcggcctattggttaaaaaatgagctgatttaacaaaaatttaacgcgaattttaacaaaatattaacgtttacaatttcaggtggcacttttcggggaaatgtgcgcggaacccctatttgtttatttttctaaatacattcaaatatgtatccgctcatgaattaattcttagaaaaactcatcgagcatcaaatgaaactgcaatttattcatatcaggattatcaataccatatttttgaaaaagccgtttctgtaatgaaggagaaaactcaccgaggcagttccataggatggcaagatcctggtatcggtctgcgattccgactcgtccaacatcaatacaacctattaatttcccctcgtcaaaaataaggttatcaagtgagaaatcaccatgagtgacgactgaatccggtgagaatggcaaaagtttatgcatttctttccagacttgttcaacaggccagccattacgctcgtcatcaaaatcactcgcatcaaccaaaccgttattcattcgtgattgcgcctgagcgagacgaaatacgcgatcgctgttaaaaggacaattacaaacaggaatcgaatgcaaccggcgcaggaacactgccagcgcatcaacaatattttcacctgaatcaggatattcttctaatacctggaatgctgttttcccggggatcgcagtggtgagtaaccatgcatcatcaggagtacggataaaatgcttgatggtcggaagaggcataaattccgtcagccagtttagtctgaccatctcatctgtaacatcattggcaacgctacctttgccatgtttcagaaacaactctggcgcatcgggcttcccatacaatcgatagattgtcgcacctgattgcccgacattatcgcgagcccatttatacccatataaatcagcatccatgttggaatttaatcgcggcctagagcaagacgtttcccgttgaatatggctcataacaccccttgtattactgtttatgtaagcagacagttttattgttcatgaccaaaatcccttaacgtgagttttcgttccactgagcgtcagaccccgtagaaaagatcaaaggatcttcttgagatcctttttttctgcgcgtaatctgctgcttgcaaacaaaaaaaccaccgctaccagcggtggtttgtttgccggatcaagagctaccaactctttttccgaaggtaactggcttcagcagagcgcagataccaaatactgtccttctagtgtagccgtagttaggccaccacttcaagaactctgtagcaccgcctacatacctcgctctgctaatcctgttaccagtggctgctgccagtggcgataagtcgtgtcttaccgggttggactcaagacgatagttaccggataaggcgcagcggtcgggctgaacggggggttcgtgcacacagcccagcttggagcgaacgacctacaccgaactgagatacctacagcgtgagctatgagaaagcgccacgcttcccgaagggagaaaggcggacaggtatccggtaagcggcagggtcggaacaggagagcgcacgagggagcttccagggggaaacgcctggtatctttatagtcctgtcgggtttcgccacctctgacttgagcgtcgatttttgtgatgctcgtcaggggggcggagcctatggaaaaacgccagcaacgcggcctttttacggttcctggccttttgctggccttttgctcacatgttctttcctgcgttatcccctgattctgtggataaccgtattaccgcctttgagtgagctgataccgctcgccgcagccgaacgaccgagcgcagcgagtcagtgagcgaggaagcggaagagcgcctgatgcggtattttctccttacgcatctgtgcggtatttcacaccgcatatatggtgcactctcagtacaatctgctctgatgccgcatagttaagccagtatacactccgctatcgctacgtgactgggtcatggctgcgccccgacacccgccaacacccgctgacgcgccctgacgggcttgtctgctcccggcatccgcttacagacaagctgtgaccgtctccgggagctgcatgtgtcagaggttttcaccgtcatcaccgaaacgcgcgaggcagctgcggtaaagctcatcagcgtggtcgtgaagcgattcacagatgtctgcctgttcatccgcgtccagctcgttgagtttctccagaagcgttaatgtctggcttctgataaagcgggccatgttaagggcggttttttcctgtttggtcactgatgcctccgtgtaagggggatttctgttcatgggggtaatgataccgatgaaacgagagaggatgctcacgatacgggttactgatgatgaacatgcccggttactggaacgttgtgagggtaaacaactggcggtatggatgcggcgggaccagagaaaaatcactcagggtcaatgccagcgcttcgttaatacagatgtaggtgttccacagggtagccagcagcatcctgcgatgcagatccggaacataatggtgcagggcgctgacttccgcgtttccagactttacgaaacacggaaaccgaagaccattcatgttgttgctcaggtcgcagacgttttgcagcagcagtcgcttcacgttcgctcgcgtatcggtgattcattctgctaaccagtaaggcaaccccgccagcctagccgggtcctcaacgacaggagcacgatcatgcgcacccgtggggccgccatgccggcgataatggcctgcttctcgccgaaacgtttggtggcgggaccagtgacgaaggcttgagcgagggcgtgcaagattccgaataccgcaagcgacaggccgatcatcgtcgcgctccagcgaaagcggtcctcgccgaaaatgacccagagcgctgccggcacctgtcctacgagttgcatgataaagaagacagtcataagtgcggcgacgatagtcatgccccgcgcccaccggaaggagctgactgggttgaaggctctcaagggcatcggtcgagatcccggtgcctaatgagtgagctaacttacattaattgcgttgcgctcactgcccgctttccagtcgggaaacctgtcgtgccagctgcattaatgaatcggccaacgcgcggggagaggcggtttgcgtattgggcgccagggtggtttttcttttcaccagtgagacgggcaacagctgattgcccttcaccgcctggccctgagagagttgcagcaagcggtccacgctggtttgccccagcaggcgaaaatcctgtttgatggtggttaacggcgggatataacatgagctgtcttcggtatcgtcgtatcccactaccgagatatccgcaccaacgcgcagcccggactcggtaatggcgcgcattgcgcccagcgccatctgatcgttggcaaccagcatcgcagtgggaacgatgccctcattcagcatttgcatggtttgttgaaaaccggacatggcactccagtcgccttcccgttccgctatcggctgaatttgattgcgagtgagatatttatgccagccagccagacgcagacgcgccgagacagaacttaatgggcccgctaacagcgcgatttgctggtgacccaatgcgaccagatgctccacgcccagtcgcgtaccgtcttcatgggagaaaataatactgttgatgggtgtctggtcagagacatcaagaaataacgccggaacattagtgcaggcagcttccacagcaatggcatcctggtcatccagcggatagttaatgatcagcccactgacgcgttgcgcgagaagattgtgcaccgccgctttacaggcttcgacgccgcttcgttctaccatcgacaccaccacgctggcacccagttgatcggcgcgagatttaatcgccgcgacaatttgcgacggcgcgtgcagggccagactggaggtggcaacgccaatcagcaacgactgtttgcccgccagttgttgtgccacgcggttgggaatgtaattcagctccgccatcgccgcttccactttttcccgcgttttcgcagaaacgtggctggcctggttcaccacgcgggaaacggtctgataagagacaccggcatactctgcgacatcgtataacgttactggtttcacattcaccaccctgaattgactctcttccgggcgctatcatgccataccgcgaaaggttttgcgccattcgatggtgtccgggatctcgacgctctcccttatgcgactcctgcattaggaagcagcccagtagtaggttgaggccgttgagcaccgccgccgcaaggaatggtgcatgcaaggagatggcgcccaacagtcccccggccacggggcctgccaccatacccacgccgaaacaagcgctcatgagcccgaagtggcgagcccgatcttccccatcggtgatgtcggcgatataggcgccagcaaccgcacctgtggcgccggtgatgccggccacgatgcgtccggcgtagaggatcgagatctcgatcccgcgaaattaatacgactcactataggggaattgtgagcggataacaattcccctctagaaataattttgtttaactttaagaaggagatataccatgggcagcagccatcatcatcatcatcacagcagcggcctggtgccgcgcggcagccatatggctagtatggatctggatgcagtaaggattaaagtggacacagtaaatgcaaaaccgggagacacagtaaatatacctgtaagattcagtggtataccatccaagggaatagcaaactgtgactttgtatacagctatgacccgaatgtacttgagataatagagataaaaccgggagaattgatagttgacccgaatcctaccaagagctttgatactgcagtatatcctgacagaaagatgatagtattcctgtttgcggaagacagcggaacaggagcgtatgcaataactaaagacggagtatttgctacgatagtagcgaaagtaaaagaaggagcacctaacgggctcagtgtaatcaaatttgtagaagtaggcggatttgcgaacaatgaccttgtagaacagaagacacagttctttgacggtggagtaaatgttggagatacaacagaacctgcaacacctacaacacctgtaacaacaccgacaacaacagatgatctagatgcagctagcatggcagagatgaagaccgatgccgctaccctcgcgcaggaggcaggtaatttcgagcggatctccggcgacctgaaaacccagatcgaccaggtggagtcgacggcaggttcgttgcagggccagtggcgcggcgcggcggggacggccgcccaggccgcggtggtgcgcttccaagaagcagccaataagcagaagcaggaactcgacgagatctcgacgaatattcgtcaggccggcgtccaatactcgagggccgacgaggagcagcagcaggcgctgtcctcgcaaatgggcttctgagcggccgcactcgagcaccaccaccaccaccactgagatccggctgctaacaaagcccgaaaggaagctgagttggctgctgccaccgctgagcaataactagcataaccccttggggcctctaaacgggtcttgaggggttttttgctgaaaggaggaactatatccggat

SEQ ID NO: 189 - protein, 295 aa, Artificial Sequence
  Description of Artificial Sequence: Synthetic polypeptide
MGSSHHHHHHSSGLVPRGSHMASMDLDAVRIKVDTVNAKPGDTVNIPVRFSGIPSKGIANCDFVYSYDPNVLEIIEIKPGELIVDPNPTKSFDTAVYPDRKMIVFLFAEDSGTGAYAITKDGVFATIVAKVKEGAPNGLSVIKFVEVGGFANNDLVEQKTQFFDGGVNVGDTTEPATPTTPVTTPTTTDDLDAASMAEMKTDAATLAQEAGNFERISGDLKTQIDQVESTAGSLQGQWRGAAGTAAQAAVVRFQEAANKQKQELDEISTNIRQAGVQYSRADEEQQQALSSQMGF

SEQ ID NO: 190 - DNA, 6115 bp, Artificial Sequence
  Description of Artificial Sequence: Synthetic polynucleotide
tggcgaatgggacgcgccctgtagcggcgcattaagcgcggcgggtgtggtggttacgcgcagcgtgaccgctacacttgccagcgccctagcgcccgctcctttcgctttcttcccttcctttctcgccacgttcgccggctttccccgtcaagctctaaatcgggggctccctttagggttccgatttagtgctttacggcacctcgaccccaaaaaacttgattagggtgatggttcacgtagtgggccatcgccctgatagacggtttttcgccctttgacgttggagtccacgttctttaatagtggactcttgttccaaactggaacaacactcaaccctatctcggtctattcttttgatttataagggattttgccgatttcggcctattggttaaaaaatgagctgatttaacaaaaatttaacgcgaattttaacaaaatattaacgtttacaatttcaggtggcacttttcggggaaatgtgcgcggaacccctatttgtttatttttctaaatacattcaaatatgtatccgctcatgaattaattcttagaaaaactcatcgagcatcaaatgaaactgcaatttattcatatcaggattatcaataccatatttttgaaaaagccgtttctgtaatgaaggagaaaactcaccgaggcagttccataggatggcaagatcctggtatcggtctgcgattccgactcgtccaacatcaatacaacctattaatttcccctcgtcaaaaataaggttatcaagtgagaaatcaccatgagtgacgactgaatccggtgagaatggcaaaagtttatgcatttctttccagacttgttcaacaggccagccattacgctcgtcatcaaaatcactcgcatcaaccaaaccgttattcattcgtgattgcgcctgagcgagacgaaatacgcgatcgctgttaaaaggacaattacaaacaggaatcgaatgcaaccggcgcaggaacactgccagcgcatcaacaatattttcacctgaatcaggatattcttctaatacctggaatgctgttttcccggggatcgcagtggtgagtaaccatgcatcatcaggagtacggataaaatgcttgatggtcggaagaggcataaattccgtcagccagtttagtctgaccatctcatctgtaacatcattggcaacgctacctttgccatgtttcagaaacaactctggcgcatcgggcttcccatacaatcgatagattgtcgcacctgattgcccgacattatcgcgagcccatttatacccatataaatcagcatccatgttggaatttaatcgcggcctagagcaagacgtttcccgttgaatatggctcataacaccccttgtattactgtttatgtaagcagacagttttattgttcatgaccaaaatcccttaacgtgagttttcgttccactgagcgtcagaccccgtagaaaagatcaaaggatcttcttgagatcctttttttctgcgcgtaatctgctgcttgcaaacaaaaaaaccaccgctaccagcggtggtttgtttgccggatcaagagctaccaactctttttccgaaggtaactggcttcagcagagcgcagataccaaatactgtccttctagtgtagccgtagttaggccaccacttcaagaactctgtagcaccgcctacatacctcgctctgctaatcctgttaccagtggctgctgccagtggcgataagtcgtgtcttaccgggttggactcaagacgatagttaccggataaggcgcagcggtcgggctgaacggggggttcgtgcacacagcccagcttggagcgaacgacctacaccgaactgagatacctacagcgtgagctatgagaaagcgccacgcttcccgaagggagaaaggcggacaggtatccggtaagcggcagggtcggaacaggagagcgcacgagggagcttccagggggaaacgcctggtatctttatagtcctgtcgggtttcgccacctctgacttgagcgtcgatttttgtgatgctcgtcaggggggcggagcctatggaaaaacgccagcaacgcggcctttttacggttcctggccttttgctggccttttgctcacatgttctttcctgcgttatcccctgattctgtggataaccgtattaccgcctttgagtgagctgataccgctcgccgcagccgaacgaccgagcgcagcgagtcagtgagcgaggaagcggaagagcgcctgatgcggtattttctccttacgcatctgtgcggtatttcacaccgcatatatggtgcactctcagtacaatctgctctgatgccgcatagttaagccagtatacactccgctatcgctacgtgactgggtcatggctgcgccccgacacccgccaacacccgctgacgcgccctgacgggcttgtctgctcccggcatccgcttacagacaagctgtgaccgtctccgggagctgcatgtgtcagaggttttcaccgtcatcaccgaaacgcgcgaggcagctgcggtaaagctcatcagcgtggtcgtgaagcgattcacagatgtctgcctgttcatccgcgtccagctcgttgagtttctccagaagcgttaatgtctggcttctgataaagcgggccatgttaagggcggttttttcctgtttggtcactgatgcctccgtgtaagggggatttctgttcatgggggtaatgataccgatgaaacgagagaggatgctcacgatacgggttactgatgatgaacatgcccggttactggaacgttgtgagggtaaacaactggcggtatggatgcggcgggaccagagaaaaatcactcagggtcaatgccagcgcttcgttaatacagatgtaggtgttccacagggtagccagcagcatcctgcgatgcagatccggaacataatggtgcagggcgctgacttccgcgtttccagactttacgaaacacggaaaccgaagaccattcatgttgttgctcaggtcgcagacgttttgcagcagcagtcgcttcacgttcgctcgcgtatcggtgattcattctgctaaccagtaaggcaaccccgccagcctagccgggtcctcaacgacaggagcacgatcatgcgcacccgtggggccgccatgccggcgataatggcctgcttctcgccgaaacgtttggtggcgggaccagtgacgaaggcttgagcgagggcgtgcaagattccgaataccgcaagcgacaggccgatcatcgtcgcgctccagcgaaagcggtcctcgccgaaaatgacccagagcgctgccggcacctgtcctacgagttgcatgataaagaagacagtcataagtgcggcgacgatagtcatgccccgcgcccaccggaaggagctgactgggttgaaggctctcaagggcatcggtcgagatcccggtgcctaatgagtgagctaacttacattaattgcgttgcgctcactgcccgctttccagtcgggaaacctgtcgtgccagctgcattaatgaatcggccaacgcgcggggagaggcggtttgcgtattgggcgccagggtggtttttcttttcaccagtgagacgggcaacagctgattgcccttcaccgcctggccctgagagagttgcagcaagcggtccacgctggtttgccccagcaggcgaaaatcctgtttgatggtggttaacggcgggatataacatgagctgtcttcggtatcgtcgtatcccactaccgagatatccgcaccaacgcgcagcccggactcggtaatggcgcgcattgcgcccagcgccatctgatcgttggcaaccagcatcgcagtgggaacgatgccctcattcagcatttgcatggtttgttgaaaaccggacatggcactccagtcgccttcccgttccgctatcggctgaatttgattgcgagtgagatatttatgccagccagccagacgcagacgcgccgagacagaacttaatgggcccgctaacagcgcgatttgctggtgacccaatgcgaccagatgctccacgcccagtcgcgtaccgtcttcatgggagaaaataatactgttgatgggtgtctggtcagagacatcaagaaataacgccggaacattagtgcaggcagcttccacagcaatggcatcctggtcatccagcggatagttaatgatcagcccactgacgcgttgcgcgagaagattgtgcaccgccgctttacaggcttcgacgccgcttcgttctaccatcgacaccaccacgctggcacccagttgatcggcgcgagatttaatcgccgcgacaatttgcgacggcgcgtgcagggccagactggaggtggcaacgccaatcagcaacgactgtttgcccgccagttgttgtgccacgcggttgggaatgtaattcagctccgccatcgccgcttccactttttcccgcgttttcgcagaaacgtggctggcctggttcaccacgcgggaaacggtctgataagagacaccggcatactctgcgacatcgtataacgttactggtttcacattcaccaccctgaattgactctcttccgggcgctatcatgccataccgcgaaaggttttgcgccattcgatggtgtccgggatctcgacgctctcccttatgcgactcctgcattaggaagcagcccagtagtaggttgaggccgttgagcaccgccgccgcaaggaatggtgcatgcaaggagatggcgcccaacagtcccccggccacggggcctgccaccatacccacgccgaaacaagcgctcatgagcccgaagtggcgagcccgatcttccccatcggtgatgtcggcgatataggcgccagcaaccgcacctgtggcgccggtgatgccggccacgatgcgtccggcgtagaggatcgagatctcgatcccgcgaaattaatacgactcactataggggaattgtgagcggataacaattcccctctagaaataattttgtttaactttaagaaggagatataccatgggcagcagccatcatcatcatcatcacagcagcggcctggtgccgcgcggcagccatatggctagtatggatctggatgcagtaaggattaaagtggacacagtaaatgcaaaaccgggagacacagtaaatatacctgtaagattcagtggtataccatccaagggaatagcaaactgtgactttgtatacagctatgacccgaatgtacttgagataatagagataaaaccgggagaattgatagttgacccgaatcctaccaagagctttgatactgcagtatatcctgacagaaagatgatagtattcctgtttgcggaagacagcggaacaggagcgtatgcaataactaaagacggagtatttgctacgatagtagcgaaagtaaaagaaggagcacctaacgggctcagtgtaatcaaatttgtagaagtaggcggatttgcgaacaatgaccttgtagaacagaagacacagttctttgacggtggagtaaatgttggagatacaacagaacctgcaacacctacaacacctgtaacaacaccgacaacaacagatgatctagatgcagctagcatgacagagcagcagtggaatttcgcgggtatcgaggccgcggcaagcgcaatccagggaaatgtcacgtccattcattccctccttgacgaggggaagcagtccctgaccaagctcgcagcggcctggggcggtagcggttcggaggcgtaccagggtgtccagcaaaaatgggacgccacggctaccgagctgaacaacgcgctgcagaacctggcgcggacgatcagcgaagccggtcaggcaatggcttcgaccgaaggcaacgtcactgggatgttcgcataggcggccgcactcgagcaccaccaccaccaccactgagatccggctgctaacaaagcccgaaaggaagctgagttggctgctgccaccgctgagcaataactagcataaccccttggggcctctaaacgggtcttgaggggttttttgctgaaaggaggaactatatccggat

SEQ ID NO: 191 - protein, 290 aa, Artificial Sequence
  Description of Artificial Sequence: Synthetic polypeptide
MGSSHHHHHHSSGLVPRGSHMASMDLDAVRIKVDTVNAKPGDTVNIPVRFSGIPSKGIANCDFVYSYDPNVLEIIEIKPGELIVDPNPTKSFDTAVYPDRKMIVFLFAEDSGTGAYAITKDGVFATIVAKVKEGAPNGLSVIKFVEVGGFANNDLVEQKTQFFDGGVNVGDTTEPATPTTPVTTPTTTDDLDAASMTEQQWNFAGIEAAASAIQGNVTSIHSLLDEGKQSLTKLAAAWGGSGSEAYQGVQQKWDATATELNNALQNLARTISEAGQAMASTEGNVTGMFA

SEQ ID NO: 192 - DNA, 7009 bp, Artificial Sequence
  Description of Artificial Sequence: Synthetic polynucleotide
tggcgaatgggacgcgccctgtagcggcgcattaagcgcggcgggtgtggtggttacgcgcagcgtgaccgctacacttgccagcgccctagcgcccgctcctttcgctttcttcccttcctttctcgccacgttcgccggctttccccgtcaagctctaaatcgggggctccctttagggttccgatttagtgctttacggcacctcgaccccaaaaaacttgattagggtgatggttcacgtagtgggccatcgccctgatagacggtttttcgccctttgacgttggagtccacgttctttaatagtggactcttgttccaaactggaacaacactcaaccctatctcggtctattcttttgatttataagggattttgccgatttcggcctattggttaaaaaatgagctgatttaacaaaaatttaacgcgaattttaacaaaatattaacgtttacaatttcaggtggcacttttcggggaaatgtgcgcggaacccctatttgtttatttttctaaatacattcaaatatgtatccgctcatgaattaattcttagaaaaactcatcgagcatcaaatgaaactgcaatttattcatatcaggattatcaataccatatttttgaaaaagccgtttctgtaatgaaggagaaaactcaccgaggcagttccataggatggcaagatcctggtatcggtctgcgattccgactcgtccaacatcaatacaacctattaatttcccctcgtcaaaaataaggttatcaagtgagaaatcaccatgagtgacgactgaatccggtgagaatggcaaaagtttatgcatttctttccagacttgttcaacaggccagccattacgctcgtcatcaaaatcactcgcatcaaccaaaccgttattcattcgtgattgcgcctgagcgagacgaaatacgcgatcgctgttaaaaggacaattacaaacaggaatcgaatgcaaccggcgcaggaacactgccagcgcatcaacaatattttcacctgaatcaggatattcttctaatacctggaatgctgttttcccggggatcgcagtggtgagtaaccatgcatcatcaggagtacggataaaatgcttgatggtcggaagaggcataaattccgtcagccagtttagtctgaccatctcatctgtaacatcattggcaacgctacctttgccatgtttcagaaacaactctggcgcatcgggcttcccatacaatcgatagattgtcgcacctgattgcccgacattatcgcgagcccatttatacccatataaatcagcatccatgttggaatttaatcgcggcctagagcaagacgtttcccgttgaatatggctcataacaccccttgtattactgtttatgtaagcagacagttttattgttcatgaccaaaatcccttaacgtgagttttcgttccactgagcgtcagaccccgtagaaaagatcaaaggatcttcttgagatcctttttttctgcgcgtaatctgctgcttgcaaacaaaaaaaccaccgctaccagcggtggtttgtttgccggatcaagagctaccaactctttttccgaaggtaactggcttcagcagagcgcagataccaaatactgtccttctagtgtagccgtagttaggccaccacttcaagaactctgtagcaccgcctacatacctcgctctgctaatcctgttaccagtggctgctgccagtggcgataagtcgtgtcttaccgggttggactcaagacgatagttaccggataaggcgcagcggtcgggctgaacggggggttcgtgcacacagcccagcttggagcgaacgacctacaccgaactgagatacctacagcgtgagctatgagaaagcgccacgcttcccgaagggagaaaggcggacaggtatccggtaagcggcagggtcggaacaggagagcgcacgagggagcttccagggggaaacgcctggtatctttatagtcctgtcgggtttcgccacctctgacttgagcgtcgatttttgtgatgctcgtcaggggggcggagcctatggaaaaacgccagcaacgcggcctttttacggttcctggccttttgctggccttttgctcacatgttctttcctgcgttatcccctgattctgtggataaccgtattaccgcctttgagtgagctgataccgctcgccgcagccgaacgaccgagcgcagcgagtcagtgagcgaggaagcggaagagcgcctgatgcggtattttctccttacgcatctgtgcggtatttcacaccgcatatatggtgcactctcagtacaatctgctctgatgccgcatagttaagccagtatacactccgctatcgctacgtgactgggtcatggctgcgccccgacacccgccaacacccgctgacgcgccctgacgggcttgtctgctcccggcatccgcttacagacaagctgtgaccgtctccgggagctgcatgtgtcagaggttttcaccgtcatcaccgaaacgcgcgaggcagctgcggtaaagctcatcagcgtggtcgtgaagcgattcacagatgtctgcctgttcatccgcgtccagctcgttgagtttctccagaagcgttaatgtctggcttctgataaagcgggccatgttaagggcggttttttcctgtttggtcactgatgcctccgtgtaagggggatttctgttcatgggggtaatgataccgatgaaacgagagaggatgctcacgatacgggttactgatgatgaacatgcccggttactggaacgttgtgagggtaaacaactggcggtatggatgcggcgggaccagagaaaaatcactcagggtcaatgccagcgcttcgttaatacagatgtaggtgttccacagggtagccagcagcatcctgcgatgcagatccggaacataatggtgcagggcgctgacttccgcgtttccagactttacgaaacacggaaaccgaagaccattcatgttgttgctcaggtcgcagacgttttgcagcagcagtcgcttcacgttcgctcgcgtatcggtgattcattctgctaaccagtaaggcaaccccgccagcctagccgggtcctcaacgacaggagcacgatcatgcgcacccgtggggccgccatgccggcgataatggcctgcttctcgccgaaacgtttggtggcgggaccagtgacgaaggcttgagcgagggcgtgcaagattccgaataccgcaagcgacaggccgatcatcgtcgcgctccagcgaaagcggtcctcgccgaaaatgacccagagcgctgccggcacctgtcctacgagttgcatgataaagaagacagtcataagtgcggcgacgatagtcatgccccgcgcccaccggaaggagctgactgggttgaaggctctcaagggcatcggtcgagatcccggtgcctaatgagtgagctaacttacattaattgcgttgcgctcactgcccgctttccagtcgggaaacctgtcgtgccagctgcattaatgaatcggccaacgcgcggggagaggcggtttgcgtattgggcgccagggtggtttttcttttcaccagtgagacgggcaacagctgattgcccttcaccgcctggccctgagagagttgcagcaagcggtccacgctggtttgccccagcaggcgaaaatcctgtttgatggtggttaacggcgggatataacatgagctgtcttcggtatcgtcgtatcccactaccgagatatccgcaccaacgcgcagcccggactcggtaatggcgcgcattgcgcccagcgccatctgatcgttggcaaccagcatcgcagtgggaacgatgccctcattcagcatttgcatggtttgttgaaaaccggacatggcactccagtcgccttcccgttccgctatcggctgaatttgattgcgagtgagatatttatgccagccagccagacgcagacgcgccgagacagaacttaatgggcccgctaacagcgcgatttgctggtgacccaatgcgaccagatgctccacgcccagtcgcgtaccgtcttcatgggagaaaataatactgttgatgggtgtctggtcagagacatcaagaaataacgccggaacattagtgcaggcagcttccacagcaatggcatcctggtcatccagcggatagttaatgatcagcccactgacgcgttgcgcgagaagattgtgcaccgccgctttacaggcttcgacgccgcttcgttctaccatcgacaccaccacgctggcacccagttgatcggcgcgagatttaatcgccgcgacaatttgcgacggcgcgtgcagggccagactggaggtggcaacgccaatcagcaacgactgtttgcccgccagttgttgtgccacgcggttgggaatgtaattcagctccgccatcgccgcttccactttttcccgcgttttcgcagaaacgtggctggcctggttcaccacgcgggaaacggtctgataagagacaccggcatactctgcgacatcgtataacgttactggtttcacattcaccaccctgaattgactctcttccgggcgctatcatgccataccgcgaaaggttttgcgccattcgatggtgtccgggatctcgacgctctcccttatgcgactcctgcattaggaagcagcccagtagtaggttgaggccgttgagcaccgccgccgcaaggaatggtgcatgcaaggagatggcgcccaacagtcccccggccacggggcctgccaccatacccacgccgaaacaagcgctcatgagcccgaagtggcgagcccgatcttccccatcggtgatgtcggcgatataggcgccagcaaccgcacctgtggcgccggtgatgccggccacgatgcgtccggcgtagaggatcgagatctcgatcccgcgaaattaatacgactcactataggggaattgtgagcggataacaattcccctctagaaataattttgtttaactttaagaaggagatataccatgggcagcagccatcatcatcatcatcacagcagcggcctggtgccgcgcggcagccatatggctagtatggatctggatgcagtaaggattaaagtggacacagtaaatgcaaaaccgggagacacagtaaatatacctgtaagattcagtggtataccatccaagggaatagcaaactgtgactttgtatacagctatgacccgaatgtacttgagataatagagataaaaccgggagaattgatagttgacccgaatcctaccaagagctttgatactgcagtatatcctgacagaaagatgatagtattcctgtttgcggaagacagcggaacaggagcgtatgcaataactaaagacggagtatttgctacgatagtagcgaaagtaaaagaaggagcacctaacgggctcagtgtaatcaaatttgtagaagtaggcggatttgcgaacaatgaccttgtagaacagaagacacagttctttgacggtggagtaaatgttggagatacaacagaacctgcaacacctacaacacctgtaacaacaccgacaacaacagatgatctagatgcagctagcgtggtggatttcggggcgttaccaccggagatcaactccgcgaggatgtacgccggcccgggttcggcctcgctggtggccgccgcgaagatgtgggacagcgtggcgagtgacctgttttcggccgcgtcggcgtttcagtcggtggtctggggtctgacggtggggtcgtggataggttcgtcggcgggtctgatggcggcggcggcctcgccgtatgtggcgtggatgagcgtcaccgcggggcaggcccagctgaccgccgcccaggtccgggttgctgcggcggcctacgagacagcgtataggctgacggtgcccccgccggtgatcgccgagaaccgtaccgaactgatgacgctgaccgcgaccaacctcttggggcaaaacacgccggcgatcgaggccaatcaggccgcatacagccagatgtggggccaagacgcggaggcgatgtatggctacgccgccacggcggcgacggcgaccgaggcgttgctgccgttcgaggacgccccactgatcaccaaccccggcgggctccttgagcaggccgtcgcggtcgaggaggccatcgacaccgccgcggcgaaccagttgatgaacaatgtgccccaagcgctgcaacagctggcccagccagcgcagggcgtcgtaccttcttccaagctgggtgggctgtggacggcggtctcgccgcatctgtcgccgctcagcaacgtcagttcgatagccaacaaccacatgtcgatgatgggcacgggtgtgtcgatgaccaacaccttgcactcgatgttgaagggcttagctccggcggcggctcaggccgtggaaaccgcggcggaaaacggggtctgggcgatgagctcgctgggcagccagctgggttcgtcgctgggttcttcgggtctgggcgctggggtggccgccaacttgggtcgggcggcctcggtcggttcgttgtcggtgccgccagcatgggccgcggccaaccaggcggtcaccccggcggcgcgggcgctgccgctgaccagcctgaccagcgccgcccaaaccgcccccggacacatgctgggcgggctaccgctggggcactcggtcaacgccggcagcggtatcaacaatgcgctgcgggtgccggcacgggcctacgcgataccccgcacaccggccgccggataggcggccgcactcgagcaccaccaccaccaccactgagatccggctgctaacaaagcccgaaaggaagctgagttggctgctgccaccgctgagcaataactagcataaccccttggggcctctaaacgggtcttgaggggttttttgctgaaaggaggaactatatccggat

SEQ ID NO: 193 - protein, 588 aa, Artificial Sequence
  Description of Artificial Sequence: Synthetic polypeptide
MGSSHHHHHHSSGLVPRGSHMASMDLDAVRIKVDTVNAKPGDTVNIPVRFSGIPSKGIANCDFVYSYDPNVLEIIEIKPGELIVDPNPTKSFDTAVYPDRKMIVFLFAEDSGTGAYAITKDGVFATIVAKVKEGAPNGLSVIKFVEVGGFANNDLVEQKTQFFDGGVNVGDTTEPATPTTPVTTPTTTDDLDAASVVDFGALPPEINSARMYAGPGSASLVAAAKMWDSVASDLFSAASAFQSVVWGLTVGSWIGSSAGLMAAAASPYVAWMSVTAGQAQLTAAQVRVAAAAYETAYRLTVPPPVIAENRTELMTLTATNLLGQNTPAIEANQAAYSQMWGQDAEAMYGYAATAATATEALLPFEDAPLITNPGGLLEQAVAVEEAIDTAAANQLMNNVPQALQQLAQPAQGVVPSSKLGGLWTAVSPHLSPLSNVSSIANNHMSMMGTGVSMTNTLHSMLKGLAPAAAQAVETAAENGVWAMSSLGSQLGSSLGSSGLGAGVAANLGRAASVGSLSVPPAWAAANQAVTPAARALPLTSLTSAAQTAPGHMLGGLPLGHSVNAGSGINNALRVPARAYAIPRTPAAG

SEQ ID NO: 194 - DNA, 6951 bp, Artificial Sequence
  Description of Artificial Sequence: Synthetic polynucleotide
tggcgaatgggacgcgccctgtagcggcgcattaagcgcggcgggtgtggtggttacgcgcagcgtgaccgctacacttgccagcgccctagcgcccgctcctttcgctttcttcccttcctttctcgccacgttcgccggctttccccgtcaagctctaaatcgggggctccctttagggttccgatttagtgctttacggcacctcgaccccaaaaaacttgattagggtgatggttcacgtagtgggccatcgccctgatagacggtttttcgccctttgacgttggagtccacgttctttaatagtggactcttgttccaaactggaacaacactcaaccctatctcggtctattcttttgatttataagggattttgccgatttcggcctattggttaaaaaatgagctgatttaacaaaaatttaacgcgaattttaacaaaatattaacgtttacaatttcaggtggcacttttcggggaaatgtgcgcggaacccctatttgtttatttttctaaatacattcaaatatgtatccgctcatgaattaattcttagaaaaactcatcgagcatcaaatgaaactgcaatttattcatatcaggattatcaataccatatttttgaaaaagccgtttctgtaatgaaggagaaaactcaccgaggcagttccataggatggcaagatcctggtatcggtctgcgattccgactcgtccaacatcaatacaacctattaatttcccctcgtcaaaaataaggttatcaagtgagaaatcaccatgagtgacgactgaatccggtgagaatggcaaaagtttatgcatttctttccagacttgttcaacaggccagccattacgctcgtcatcaaaatcactcgcatcaaccaaaccgttattcattcgtgattgcgcctgagcgagacgaaatacgcgatcgctgttaaaaggacaattacaaacaggaatcgaatgcaaccggcgcaggaacactgccagcgcatcaacaatattttcacctgaatcaggatattcttctaatacctggaatgctgttttcccggggatcgcagtggtgagtaaccatgcatcatcaggagtacggataaaatgcttgatggtcggaagaggcataaattccgtcagccagtttagtctgaccatctcatctgtaacatcattggcaacgctacctttgccatgtttcagaaacaactctggcgcatcgggcttcccatacaatcgatagattgtcgcacctgattgcccgacattatcgcgagcccatttatacccatataaatcagcatccatgttggaatttaatcgcggcctagagcaagacgtttcccgttgaatatggctcataacaccccttgtattactgtttatgtaagcagacagttttattgttcatgaccaaaatcccttaacgtgagttttcgttccactgagcgtcagaccccgtagaaaagatcaaaggatcttcttgagatcctttttttctgcgcgtaatctgctgcttgcaaacaaaaaaaccaccgctaccagcggtggtttgtttgccggatcaagagctaccaactctttttccgaaggtaactggcttcagcagagcgcagataccaaatactgtccttctagtgtagccgtagttaggccaccacttcaagaactctgtagcaccgcctacatacctcgctctgctaatcctgttaccagtggctgctgccagtggcgataagtcgtgtcttaccgggttggactcaagacgatagttaccggataaggcgcagcggtcgggctgaacggggggttcgtgcacacagcccagcttggagcgaacgacctacaccgaactgagatacctacagcgtgagctatgagaaagcgccacgcttcccgaagggagaaaggcggacaggtatccggtaagcggcagggtcggaacaggagagcgcacgagggagcttccagggggaaacgcctggtatctttatagtcctgtcgggtttcgccacctctgacttgagcgtcgatttttgtgatgctcgtcaggggggcggagcctatggaaaaacgccagcaacgcggcctttttacggttcctggccttttgctggccttttgctcacatgttctttcctgcgttatcccctgattctgtggataaccgtattaccgcctttgagtgagctgataccgctcgccgcagccgaacgaccgagcgcagcgagtcagtgagcgaggaagcggaagagcgcctgatgcggtattttctccttacgcatctgtgcggtatttcacaccgcatatatggtgcactctcagtacaatctgctctgatgccgcatagttaagccagtatacactccgctatcgctacgtgactgggtcatggctgcgccccgacacccgccaacacccgctgacgcgccctgacgggcttgtctgctcccggcatccgcttacagacaagctgtgaccgtctccgggagctgcatgtgtcagaggttttcaccgtcatcaccgaaacgcgcgaggcagctgcggtaaagctcatcagcgtggtcgtgaagcgattcacagatgtctgcctgttcatccgcgtccagctcgttgagtttctccagaagcgttaatgtctggcttctgataaagcgggccatgttaagggcggttttttcctgtttggtcactgatgcctccgtgtaagggggatttctgttcatgggggtaatgataccgatgaaacgagagaggatgctcacgatacgggttactgatgatgaacatgcccggttactggaacgttgtgagggtaaacaactggcggtatggatgcggcgggaccagagaaaaatcactcagggtcaatgccagcgcttcgttaatacagatgtaggtgttccacagggtagccagcagcatcctgcgatgcagatccggaacataatggtgcagggcgctgacttccgcgtttccagactttacgaaacacggaaaccgaagaccattcatgttgttgctcaggtcgcagacgttttgcagcagcagtcgcttcacgttcgctcgcgtatcggtgattcattctgctaaccagtaaggcaaccccgccagcctagccgggtcctcaacgacaggagcacgatcatgcgcacccgtggggccgccatgccggcgataatggcctgcttctcgccgaaacgtttggtggcgggaccagtgacgaaggcttgagcgagggcgtgcaagattccgaataccgcaagcgacaggccgatcatcgtcgcgctccagcgaaagcggtcctcgccgaaaatgacccagagcgctgccggcacctgtcctacgagttgcatgataaagaagacagtcataagtgcggcgacgatagtcatgccccgcgcccaccggaaggagctgactgggttgaaggctctcaagggcatcggtcgagatcccggtgcctaatgagtgagctaacttacattaattgcgttgcgctcactgcccgctttccagtcgggaaacctgtcgtgccagctgcattaatgaatcggccaacgcgcggggagaggcggtttgcgtattgggcgccagggtggtttttcttttcaccagtgagacgggcaacagctgattgcccttcaccgcctggccctgagagagttgcagcaagcggtccacgctggtttgccccagcaggcgaaaatcctgtttgatggtggttaacggcgggatataacatgagctgtcttcggtatcgtcgtatcccactaccgagatatccgcaccaacgcgcagcccggactcggtaatggcgcgcattgcgcccagcgccatctgatcgttggcaaccagcatcgcagtgggaacgatgccctcattcagcatttgcatggtttgttgaaaaccggacatggcactccagtcgccttcccgttccgctatcggctgaatttgattgcgagtgagatatttatgccagccagccagacgcagacgcgccgagacagaacttaatgggcccgctaacagcgcgatttgctggtgacccaatgcgaccagatgctccacgcccagtcgcgtaccgtcttcatgggagaaaataatactgttgatgggtgtctggtcagagacatcaagaaataacgccggaacattagtgcaggcagcttccacagcaatggcatcctggtcatccagcggatagttaatgatcagcccactgacgcgttgcgcgagaagattgtgcaccgccgctttacaggcttcgacgccgcttcgttctaccatcgacaccaccacgctggcacccagttgatcggcgcgagatttaatcgccgcgacaatttgcgacggcgcgtgcagggccagactggaggtggcaacgccaatcagcaacgactgtttgcccgccagttgttgtgccacgcggttgggaatgtaattcagctccgccatcgccgcttccactttttcccgcgttttcgcagaaacgtggctggcctggttcaccacgcgggaaacggtctgataagagacaccggcatactctgcgacatcgtataacgttactggtttcacattcaccaccctgaattgactctcttccgggcgctatcatgccataccgcgaaaggttttgcgccattcgatggtgtccgggatctcgacgctctcccttatgcgactcctgcattaggaagcagcccagtagtaggttgaggccgttgagcaccgccgccgcaaggaatggtgcatgcaaggagatggcgcccaacagtcccccggccacggggcctgccaccatacccacgccgaaacaagcgctcatgagcccgaagtggcgagcccgatcttccccatcggtgatgtcggcgatataggcgccagcaaccgcacctgtggcgccggtgatgccggccacgatgcgtccggcgtagaggatcgagatctcgatcccgcgaaattaatacgactcactataggggaattgtgagcggataacaattcccctctagaaataattttgtttaactttaagaaggagatataccatgggcagcagccatcatcatcatcatcacagcagcggcctggtgccgcgcggcagccatatggctagtatggatctggatgcagtaaggattaaagtggacacagtaaatgcaaaaccgggagacacagtaaatatacctgtaagattcagtggtataccatccaagggaatagcaaactgtgactttgtatacagctatgacccgaatgtacttgagataatagagataaaaccgggagaattgatagttgacccgaatcctaccaagagctttgatactgcagtatatcctgacagaaagatgatagtattcctgtttgcggaagacagcggaacaggagcgtatgcaataactaaagacggagtatttgctacgatagtagcgaaagtaaaagaaggagcacctaacgggctcagtgtaatcaaatttgtagaagtaggcggatttgcgaacaatgaccttgtagaacagaagacacagttctttgacggtggagtaaatgttggagatacaacagaacctgcaacacctacaacacctgtaacaacaccgacaacaacagatgatctagatgcagctagcgtgaaaattcgtttgcatacgctgttggccgtgttgaccgctgcgccgctgctgctagcagcggcgggctgtggctcgaaaccaccgagcggttcgcctgaaacgggcgccggcgccggtactgtcgcgactacccccgcgtcgtcgccggtgacgttggcggagaccggtagcacgctgctctacccgctgttcaacctgtggggtccggcctttcacgagaggtatccgaacgtcacgatcaccgctcagggcaccggttctggtgccgggatcgcgcaggccgccgccgggacggtcaacattggggcctccgacgcctatctgtcggaaggtgatatggccgcgcacaaggggctgatgaacatcgcgctagccatctccgctcagcaggtcaactacaacctgcccggagtgagcgagcacctcaagctgaacggaaaagtcctggcggccatgtaccagggcaccatcaaaacctgggacgacccgcagatcgctgcgctcaaccccggcgtgaacctgcccggcaccgcggtagttccgctgcaccgctccgacgggtccggtgacaccttcttgttcacccagtacctgtccaagcaagatcccgagggctggggcaagtcgcccggcttcggcaccaccgtcgacttcccggcggtgccgggtgcgctgggtgagaacggcaacggcggcatggtgacggttgcgccgagacaccgggctgcgtggcctatatcggcatcagcttcctcgaccaggccagtcaacggggactcggcgaggcccaactaggcaatagctctggcaatttcttgttgcccgacgcgcaaagcattcaggccgcggcggctggcttcgcatcgaaaaccccggcgaaccaggcgatttcgatgatcgacgggcccgccccggacggctacccgatcatcaactacgagtacgccatcgtcaacaaccggcaaaaggacgccgccaccgcgcagaccttgcaggcatttctgcactgggcgatcaccgacggcaacaaggcctcgttcctcgaccaggttcatttccagccgctgccgcccgcggtggtgaagttgtctgacgcgttgatcgcgacgatttccagctaggcggccgcactcgagcaccaccaccaccaccactgagatccggctgctaacaaagcccgaaaggaagctgagttggctgctgccaccgctgagcaataactagcataaccccttggggcctctaaacgggtcttgaggggttttttgctgaaaggaggaactatatccggat

SEQ ID NO: 195 - protein, 549 aa, Artificial Sequence
  Description of Artificial Sequence: Synthetic polypeptide
MGSSHHHHHHSSGLVPRGSHMASMDLDAVRIKVDTVNAKPGDTVNIPVRFSGIPSKGIANCDFVYSYDPNVLEIIEIKPGELIVDPNPTKSFDTAVYPDRKMIVFLFAEDSGTGAYAITKDGVFATIVAKVKEGAPNGLSVIKFVEVGGFANNDLVEQKTQFFDGGVNVGDTTEPATPTTPVTTPTTTDDLDAASGCGSKPPSGSPETGAGAGTVATTPASSPVTLAETGSTLLYPLFNLWGPAFHERYPNVTITAQGTGSGAGIAQAAAGTVNIGASDAYLSEGDMAAHKGLMNIALAISAQQVNYNLPGVSEHLKLNGKVLAAMYQGTIKTWDDPQIAALNPGVNLPGTAVVPLHRSDGSGDTFLFTQYLSKQDPEGWGKSPGFGTTVDFPAVPGALGENGNGGMVTGCAETPGCVAYIGISFLDQASQRGLGEAQLGNSSGNFLLPDAQSIQAAAAGFASKTPANQAISMIDGPAPDGYPIINYEYAIVNNRQKDAATAQTLQAFLHWAITDGNKASFLDQVHFQPLPPAVVKLSDALIATISSEF

SEQ ID NO: 196 - DNA, 7576 bp, Artificial Sequence
  Description of Artificial Sequence: Synthetic polynucleotide
tggcgaatgggacgcgccctgtagcggcgcattaagcgcggcgggtgtggtggttacgcgcagcgtgaccgctacacttgccagcgccctagcgcccgctcctttcgctttcttcccttcctttctcgccacgttcgccggctttccccgtcaagctctaaatcgggggctccctttagggttccgatttagtgctttacggcacctcgaccccaaaaaacttgattagggtgatggttcacgtagtgggccatcgccctgatagacggtttttcgccctttgacgttggagtccacgttctttaatagtggactcttgttccaaactggaacaacactcaaccctatctcggtctattcttttgatttataagggattttgccgatttcggcctattggttaaaaaatgagctgatttaacaaaaatttaacgcgaattttaacaaaatattaacgtttacaatttcaggtggcacttttcggggaaatgtgcgcggaacccctatttgtttatttttctaaatacattcaaatatgtatccgctcatgaattaattcttagaaaaactcatcgagcatcaaatgaaactgcaatttattcatatcaggattatcaataccatatttttgaaaaagccgtttctgtaatgaaggagaaaactcaccgaggcagttccataggatggcaagatcctggtatcggtctgcgattccgactcgtccaacatcaatacaacctattaatttcccctcgtcaaaaataaggttatcaagtgagaaatcaccatgagtgacgactgaatccggtgagaatggcaaaagtttatgcatttctttccagacttgttcaacaggccagccattacgctcgtcatcaaaatcactcgcatcaaccaaaccgttattcattcgtgattgcgcctgagcgagacgaaatacgcgatcgctgttaaaaggacaattacaaacaggaatcgaatgcaaccggcgcaggaacactgccagcgcatcaacaatattttcacctgaatcaggatattcttctaatacctggaatgctgttttcccggggatcgcagtggtgagtaaccatgcatcatcaggagtacggataaaatgcttgatggtcggaagaggcataaattccgtcagccagtttagtctgaccatctcatctgtaacatcattggcaacgctacctttgccatgtttcagaaacaactctggcgcatcgggcttcccatacaatcgatagattgtcgcacctgattgcccgacattatcgcgagcccatttatacccatataaatcagcatccatgttggaatttaatcgcggcctagagcaagacgtttcccgttgaatatggctcataacaccccttgtattactgtttatgtaagcagacagttttattgttcatgaccaaaatcccttaacgtgagttttcgttccactgagcgtcagaccccgtagaaaagatcaaaggatcttcttgagatcctttttttctgcgcgtaatctgctgcttgcaaacaaaaaaaccaccgctaccagcggtggtttgtttgccggatcaagagctaccaactctttttccgaaggtaactggcttcagcagagcgcagataccaaatactgtccttctagtgtagccgtagttaggccaccacttcaagaactctgtagcaccgcctacatacctcgctctgctaatcctgttaccagtggctgctgccagtggcgataagtcgtgtcttaccgggttggactcaagacgatagttaccggataaggcgcagcggtcgggctgaacggggggttcgtgcacacagcccagcttggagcgaacgacctacaccgaactgagatacctacagcgtgagctatgagaaagcgccacgcttcccgaagggagaaaggcggacaggtatccggtaagcggcagggtcggaacaggagagcgcacgagggagcttccagggggaaacgcctggtatctttatagtcctgtcgggtttcgccacctctgacttgagcgtcgatttttgtgatgctcgtcaggggggcggagcctatggaaaaacgccagcaacgcggcctttttacggttcctggccttttgctggccttttgctcacatgttctttcctgcgttatcccctgattctgtggataaccgtattaccgcctttgagtgagctgataccgctcgccgcagccgaacgaccgagcgcagcgagtcagtgagcgaggaagcggaagagcgcctgatgcggtattttctccttacgcatctgtgcggtatttcacaccgcatatatggtgcactctcagtacaatctgctctgatgccgcatagttaagccagtatacactccgctatcgctacgtgactgggtcatggctgcgccccgacacccgccaacacccgctgacgcgccctgacgggcttgtctgctcccggcatccgcttacagacaagctgtgaccgtctccgggagctgcatgtgtcagaggttttcaccgtcatcaccgaaacgcgcgaggcagctgcggtaaagctcatcagcgtggtcgtgaagcgattcacagatgtctgcctgttcatccgcgtccagctcgttgagtttctccagaagcgttaatgtctggcttctgataaagcgggccatgttaagggcggttttttcctgtttggtcactgatgcctccgtgtaagggggatttctgttcatgggggtaatgataccgatgaaacgagagaggatgctcacgatacgggttactgatgatgaacatgcccggttactggaacgttgtgagggtaaacaactggcggtatggatgcggcgggaccagagaaaaatcactcagggtcaatgccagcgcttcgttaatacagatgtaggtgttccacagggtagccagcagcatcctgcgatgcagatccggaacataatggtgcagggcgctgacttccgcgtttccagactttacgaaacacggaaaccgaagaccattcatgttgttgctcaggtcgcagacgttttgcagcagcagtcgcttcacgttcgctcgcgtatcggtgattcattctgctaaccagtaaggcaaccccgccagcctagccgggtcctcaacgacaggagcacgatcatgcgcacccgtggggccgccatgccggcgataatggcctgcttctcgccgaaacgtttggtggcgggaccagtgacgaaggcttgagcgagggcgtgcaagattccgaataccgcaagcgacaggccgatcatcgtcgcgctccagcgaaagcggtcctcgccgaaaatgacccagagcgctgccggcacctgtcctacgagttgcatgataaagaagacagtcataagtgcggcgacgatagtcatgccccgcgcccaccggaaggagctgactgggttgaaggctctcaagggcatcggtcgagatcccggtgcctaatgagtgagctaacttacattaattgcgttgcgctcactgcccgctttccagtcgggaaacctgtcgtgccagctgcattaatgaatcggccaacgcgcggggagaggcggtttgcgtattgggcgccagggtggtttttcttttcaccagtgagacgggcaacagctgattgcccttcaccgcctggccctgagagagttgcagcaagcggtccacgctggtttgccccagcaggcgaaaatcctgtttgatggtggttaacggcgggatataacatgagctgtcttcggtatcgtcgtatcccactaccgagatatccgcaccaacgcgcagcccggactcggtaatggcgcgcattgcgcccagcgccatctgatcgttggcaaccagcatcgcagtgggaacgatgccctcattcagcatttgcatggtttgttgaaaaccggacatggcactccagtcgccttcccgttccgctatcggctgaatttgattgcgagtgagatatttatgccagccagccagacgcagacgcgccgagacagaacttaatgggcccgctaacagcgcgatttgctggtgacccaatgcgaccagatgctccacgcccagtcgcgtaccgtcttcatgggagaaaataatactgttgatgggtgtctggtcagagacatcaagaaataacgccggaacattagtgcaggcagcttccacagcaatggcatcctggtcatccagcggatagttaatgatcagcccactgacgcgttgcgcgagaagattgtgcaccgccgctttacaggcttcgacgccgcttcgttctaccatcgacaccaccacgctggcacccagttgatcggcgcgagatttaatcgccgcgacaatttgcgacggcgcgtgcagggccagactggaggtggcaacgccaatcagcaacgactgtttgcccgccagttgttgtgccacgcggttgggaatgtaattcagctccgccatcgccgcttccactttttcccgcgttttcgcagaaacgtggctggcctggttcaccacgcgggaaacggtctgataagagacaccggcatactctgcgacatcgtataacgttactggtttcacattcaccaccctgaattgactctcttccgggcgctatcatgccataccgcgaaaggttttgcgccattcgatggtgtccgggatctcgacgctctcccttatgcgactcctgcattaggaagcagcccagtagtaggttgaggccgttgagcaccgccgccgcaaggaatggtgcatgcaaggagatggcgcccaacagtcccccggccacggggcctgccaccatacccacgccgaaacaagcgctcatgagcccgaagtggcgagcccgatcttccccatcggtgatgtcggcgatataggcgccagcaaccgcacctgtggcgccggtgatgccggccacgatgcgtccggcgtagaggatcgagatctcgatcccgcgaaattaatacgactcactataggggaattgtgagcggataacaattcccctctagaaataattttgtttaactttaagaaggagatataccatgggcagcagccatcatcatcatcatcacagcagcggcctggtgccgcgcggcagccatatggctagtatggatctggatgcagtaaggattaaagtggacacagtaaatgcaaaaccgggagacacagtaaatatacctgtaagattcagtggtataccatccaagggaatagcaaactgtgactttgtatacagctatgacccgaatgtacttgagataatagagataaaaccgggagaattgatagttgacccgaatcctaccaagagctttgatactgcagtatatcctgacagaaagatgatagtattcctgtttgcggaagacagcggaacaggagcgtatgcaataactaaagacggagtatttgctacgatagtagcgaaagtaaaagaaggagcacctaacgggctcagtgtaatcaaatttgtagaagtaggcggatttgcgaacaatgaccttgtagaacagaagacacagttctttgacggtggagtaaatgttggagatacaacagaacctgcaacacctacaacacctgtaacaacaccgacaacaacagatgatctagatgcagctagtatgaatttcgccgttttgccgccggaggtgaattcggcgcgcatattcgccggtgcgggcctgggcccaatgctggcggcggcgtcggcctgggacgggttggccgaggagttgcatgccgcggcgggctcgttcgcgtcggtgaccaccgggttggcgggcgacgcgtggcatggtccggcgtcgctggcgatgacccgcgcggccagcccgtatgtggggtggttgaacacggcggcgggtcaggccgcgcaggcggccggccaggcgcggctagcggcgagcgcgttcgaggcgacgctggcggccaccgtgtctccagcgatggtcgcggccaaccggacacggctggcgtcgctggtggcagccaacttgctgggccagaacgccccggcgatcgcggccgcggaggctgaatacgagcagatatgggcccaggacgtggccgcgatgttcggctatcactccgccgcgtcggcggtggccacgcagctggcgcctattcaagagggtttgcagcagcagctgcaaaacgtgctggcccagttggctagcgggaacctgggcagcggaaatgtgggcgtcggcaacatcggcaacgacaacattggcaacgcaaacatcggcttcggaaatcgaggcgacgccaacatcggcatcgggaatatcggcgacagaaacctcggcattgggaacaccggcaattggaatatcggcatcggcatcaccggcaacggacaaatcggcttcggcaagcctgccaaccccgacgtcttggtggtgggcaacggcggcccgggagtaaccgcgttggtcatgggcggcaccgacagcctactgccgctgcccaacatccccttactcgagtacgctgcgcggttcatcacccccgtgcatcccggatacaccgctacgttcctggaaacgccatcgcagtttttcccattcaccgggctgaatagcctgacctatgacgtctccgtggcccagggcgtaacgaatctgcacaccgcgatcatggcgcaactcgcggcgggaaacgaagtcgtcgtcttcggcacctcccaaagcgccacgatagccaccttcgaaatgcgctatctgcaatccctgccagcacacctgcgtccgggtctcgacgaattgtcctttacgttgaccggcaatcccaaccggcccgacggtggcattcttacgcgttttggcttctccataccgcagttgggtttcacattgtccggcgcgacgcccgccgacgcctaccccaccgtcgattacgcgttccagtacgacggcgtcaacgacttccccaaatacccgctgaatgtcttcgcgaccgccaacgcgatcgcgggcatccttttcctgcactccgggttgattgcgttgccgcccgatcttgcctcgggcgtggttcaaccggtgtcctcaccggacgtcctgaccacctacatcctgctgcccagccaagatctgccgctgctggtcccgctgcgtgctatccccctgctgggaaacccgcttgccgacctcatccagccggacttgcgggtgctcgtcgagttgggttatgaccgcaccgcccaccaggacgtgcccagcccgttcggactgtttccggacgtcgattgggccgaggtggccgcggacctgcagcaaggcgccgtgcaaggcgtcaacgacgccctgtccggactggggctgccgccgccgtggcagccggcgctaccccgacttttctaaaagcttgcggccgcactcgagcaccaccaccaccaccactgagatccggctgctaacaaagcccgaaaggaagctgagttggctgctgccaccgctgagcaataactagcataaccccttggggcctctaaacgggtcttgaggggttttttgctgaaaggaggaactatatccggat

SEQ ID NO: 197 - protein, 775 aa, Artificial Sequence
  Description of Artificial Sequence: Synthetic polypeptide
MGSSHHHHHHSSGLVPRGSHMASMDLDAVRIKVDTVNAKPGDTVNIPVRFSGIPSKGIANCDFVYSYDPNVLEIIEIKPGELIVDPNPTKSFDTAVYPDRKMIVFLFAEDSGTGAYAITKDGVFATIVAKVKEGAPNGLSVIKFVEVGGFANNDLVEQKTQFFDGGVNVGDTTEPATPTTPVTTPTTTDDLDAASMNFAVLPPEVNSARIFAGAGLGPMLAAASAWDGLAEELHAAAGSFASVTTGLAGDAWHGPASLAMTRAASPYVGWLNTAAGQAAQAAGQARLAASAFEATLAATVSPAMVAANRTRLASLVAANLLGQNAPAIAAAEAEYEQIWAQDVAAMFGYHSAASAVATQLAPIQEGLQQQLQNVLAQLASGNLGSGNVGVGNIGNDNIGNANIGFGNRGDANIGIGNIGDRNLGIGNTGNWNIGIGITGNGQIGFGKPANPDVLVVGNGGPGVTALVMGGTDSLLPLPNIPLLEYAARFITPVHPGYTATFLETPSQFFPFTGLNSLTYDVSVAQGVTNLHTAIMAQLAAGNEVVVFGTSQSATIATFEMRYLQSLPAHLRPGLDELSFTLTGNPNRPDGGILTRFGFSIPQLGFTLSGATPADAYPTVDYAFQYDGVNDFPKYPLNVFATANAIAGILFLHSGLIALPPDLASGVVQPVSSPDVLTTYILLPSQDLPLLVPLRAIPLLGNPLADLIQPDLRVLVELGYDRTAHQDVPSPFGLFPDVDWAEVAADLQQGAVQGVNDALSGLGLPPPWQPALPRLF

SEQ ID NO: 198 - DNA, 7045 bp, Artificial Sequence
  Description of Artificial Sequence: Synthetic polynucleotide
tggcgaatgggacgcgccctgtagcggcgcattaagcgcggcgggtgtggtggttacgcgcagcgtgaccgctacacttgccagcgccctagcgcccgctcctttcgctttcttcccttcctttctcgccacgttcgccggctttccccgtcaagctctaaatcgggggctccctttagggttccgatttagtgctttacggcacctcgaccccaaaaaacttgattagggtgatggttcacgtagtgggccatcgccctgatagacggtttttcgccctttgacgttggagtccacgttctttaatagtggactcttgttccaaactggaacaacactcaaccctatctcggtctattcttttgatttataagggattttgccgatttcggcctattggttaaaaaatgagctgatttaacaaaaatttaacgcgaattttaacaaaatattaacgtttacaatttcaggtggcacttttcggggaaatgtgcgcggaacccctatttgtttatttttctaaatacattcaaatatgtatccgctcatgaattaattcttagaaaaactcatcgagcatcaaatgaaactgcaatttattcatatcaggattatcaataccatatttttgaaaaagccgtttctgtaatgaaggagaaaactcaccgaggcagttccataggatggcaagatcctggtatcggtctgcgattccgactcgtccaacatcaatacaacctattaatttcccctcgtcaaaaataaggttatcaagtgagaaatcaccatgagtgacgactgaatccggtgagaatggcaaaagtttatgcatttctttccagacttgttcaacaggccagccattacgctcgtcatcaaaatcactcgcatcaaccaaaccgttattcattcgtgattgcgcctgagcgagacgaaatacgcgatcgctgttaaaaggacaattacaaacaggaatcgaatgcaaccggcgcaggaacactgccagcgcatcaacaatattttcacctgaatcaggatattcttctaatacctggaatgctgttttcccggggatcgcagtggtgagtaaccatgcatcatcaggagtacggataaaatgcttgatggtcggaagaggcataaattccgtcagccagtttagtctgaccatctcatctgtaacatcattggcaacgctacctttgccatgtttcagaaacaactctggcgcatcgggcttcccatacaatcgatagattgtcgcacctgattgcccgacattatcgcgagcccatttatacccatataaatcagcatccatgttggaatttaatcgcggcctagagcaagacgtttcccgttgaatatggctcataacaccccttgtattactgtttatgtaagcagacagttttattgttcatgaccaaaatcccttaacgtgagttttcgttccactgagcgtcagaccccgtagaaaagatcaaaggatcttcttgagatcctttttttctgcgcgtaatctgctgcttgcaaacaaaaaaaccaccgctaccagcggtggtttgtttgccggatcaagagctaccaactctttttccgaaggtaactggcttcagcagagcgcagataccaaatactgtccttctagtgtagccgtagttaggccaccacttcaagaactctgtagcaccgcctacatacctcgctctgctaatcctgttaccagtggctgctgccagtggcgataagtcgtgtcttaccgggttggactcaagacgatagttaccggataaggcgcagcggtcgggctgaacggggggttcgtgcacacagcccagcttggagcgaacgacctacaccgaactgagatacctacagcgtgagctatgagaaagcgccacgcttcccgaagggagaaaggcggacaggtatccggtaagcggcagggtcggaacaggagagcgcacgagggagcttccagggggaaacgcctggtatctttatagtcctgtcgggtttcgccacctctgacttgagcgtcgatttttgtgatgctcgtcaggggggcggagcctatggaaaaacgccagcaacgcggcctttttacggttcctggccttttgctggccttttgctcacatgttctttcctgcgttatcccctgattctgtggataaccgtattaccgcctttgagtgagctgataccgctcgccgcagccgaacgaccgagcgcagcgagtcagtgagcgaggaagcggaagagcgcctgatgcggtattttctccttacgcatctgtgcggtatttcacaccgcatatatggtgcactctcagtacaatctgctctgatgccgcatagttaagccagtatacactccgctatcgctacgtgactgggtcatggctgcgccccgacacccgccaacacccgctgacgcgccctgacgggcttgtctgctcccggcatccgcttacagacaagctgtgaccgtctccgggagctgcatgtgtcagaggttttcaccgtcatcaccgaaacgcgcgaggcagctgcggtaaagctcatcagcgtggtcgtgaagcgattcacagatgtctgcctgttcatccgcgtccagctcgttgagtttctccagaagcgttaatgtctggcttctgataaagcgggccatgttaagggcggttttttcctgtttggtcactgatgcctccgtgtaagggggatttctgttcatgggggtaatgataccgatgaaacgagagaggatgctcacgatacgggttactgatgatgaacatgcccggttactggaacgttgtgagggtaaacaactggcggtatggatgcggcgggaccagagaaaaatcactcagggtcaatgccagcgcttcgttaatacagatgtaggtgttccacagggtagccagcagcatcctgcgatgcagatccggaacataatggtgcagggcgctgacttccgcgtttccagactttacgaaacacggaaaccgaagaccattcatgttgttgctcaggtcgcagacgttttgcagcagcagtcgcttcacgttcgctcgcgtatcggtgattcattctgctaaccagtaaggcaaccccgccagcctagccgggtcctcaacgacaggagcacgatcatgcgcacccgtggggccgccatgccggcgataatggcctgcttctcgccgaaacgtttggtggcgggaccagtgacgaaggcttgagcgagggcgtgcaagattccgaataccgcaagcgacaggccgatcatcgtcgcgctccagcgaaagcggtcctcgccgaaaatgacccagagcgctgccggcacctgtcctacgagttgcatgataaagaagacagtcataagtgcggcgacgatagtcatgccccgcgcccaccggaaggagctgactgggttgaaggctctcaagggcatcggtcgagatcccggtgcctaatgagtgagctaacttacattaattgcgttgcgctcactgcccgctttccagtcgggaaacctgtcgtgccagctgcattaatgaatcggccaacgcgcggggagaggcggtttgcgtattgggcgccagggtggtttttcttttcaccagtgagacgggcaacagctgattgcccttcaccgcctggccctgagagagttgcagcaagcggtccacgctggtttgccccagcaggcgaaaatcctgtttgatggtggttaacggcgggatataacatgagctgtcttcggtatcgtcgtatcccactaccgagatatccgcaccaacgcgcagcccggactcggtaatggcgcgcattgcgcccagcgccatctgatcgttggcaaccagcatcgcagtgggaacgatgccctcattcagcatttgcatggtttgttgaaaaccggacatggcactccagtcgccttcccgttccgctatcggctgaatttgattgcgagtgagatatttatgccagccagccagacgcagacgcgccgagacagaacttaatgggcccgctaacagcgcgatttgctggtgacccaatgcgaccagatgctccacgcccagtcgcgtaccgtcttcatgggagaaaataatactgttgatgggtgtctggtcagagacatcaagaaataacgccggaacattagtgcaggcagcttccacagcaatggcatcctggtcatccagcggatagttaatgatcagcccactgacgcgttgcgcgagaagattgtgcaccgccgctttacaggcttcgacgccgcttcgttctaccatcgacaccaccacgctggcacccagttgatcggcgcgagatttaatcgccgcgacaatttgcgacggcgcgtgcagggccagactggaggtggcaacgccaatcagcaacgactgtttgcccgccagttgttgtgccacgcggttgggaatgtaattcagctccgccatcgccgcttccactttttcccgcgttttcgcagaaacgtggctggcctggttcaccacgcgggaaacggtctgataagagacaccggcatactctgcgacatcgtataacgttactggtttcacattcaccaccctgaattgactctcttccgggcgctatcatgccataccgcgaaaggttttgcgccattcgatggtgtccgggatctcgacgctctcccttatgcgactcctgcattaggaagcagcccagtagtaggttgaggccgttgagcaccgccgccgcaaggaatggtgcatgcaaggagatggcgcccaacagtcccccggccacggggcctgccaccatacccacgccgaaacaagcgctcatgagcccgaagtggcgagcccgatcttccccatcggtgatgtcggcgatataggcgccagcaaccgcacctgtggcgccggtgatgccggccacgatgcgtccggcgtagaggatcgagatctcgatcccgcgaaattaatacgactcactataggggaattgtgagcggataacaattcccctctagaaataattttgtttaactttaagaaggagatataccatgggcagcagccatcatcatcatcatcacagcagcggcctggtgccgcgcggcagccatatggctagtatggatctggatgcagtaaggattaaagtggacacagtaaatgcaaaaccgggagacacagtaaatatacctgtaagattcagtggtataccatccaagggaatagcaaactgtgactttgtatacagctatgacccgaatgtacttgagataatagagataaaaccgggagaattgatagttgacccgaatcctaccaagagctttgatactgcagtatatcctgacagaaagatgatagtattcctgtttgcggaagacagcggaacaggagcgtatgcaataactaaagacggagtatttgctacgatagtagcgaaagtaaaagaaggagcacctaacgggctcagtgtaatcaaatttgtagaagtaggcggatttgcgaacaatgaccttgtagaacagaagacacagttctttgacggtggagtaaatgttggagatacaacagaacctgcaacacctacaacacctgtaacaacaccgacaacaacagatgatctagatgcagctagcatggcatcgggtagcggtctttgcaagacgacgagtaactttatttggggccagttactcttgcttggagagggaatccccgacccaggcgacattttcaacaccggttcgtcgctgttcaaacaaatcagcgacaaaatgggactcgccattccgggcaccaactggatcggccaagcggcggaagcttacctaaaccagaacatcgcgcaacaacttcgcgcacaggtgatgggcgatctcgacaaattaaccggcaacatgatctcgaatcaggccaaatacgtctccgatacgcgcgacgtcctgcgggccatgaagaagatgattgacggtgtctacaaggtttgtaagggcctcgaaaagattccgctgctcggccacttgtggtcgtgggagctcgcaatccctatgtccggcatcgcgatggccgttgtcggcggcgcattgctctatctaacgattatgacgctgatgaatgcgaccaacctgaggggaattctcggcaggctgatcgagatgttgacgaccttgccaaagttccccggcctgcccgggttgcccagcctgcccgacatcatcgacggcctctggccgccgaagttgcccgacattccgatccccggcctgcccgacatcccgggcctacccgacttcaaatggccgcccacccccggcagcccgttgttccccgacctcccgtcgttcccagggttccccgggttcccggagttccccgccatccccgggttccccgcactgcccgggttgcccagcattcccaacttgttccccggcttgccgggtctgggcgacctgctgcccggcgtaggcgatttgggcaagttacccacctggactgagctggccgctttgcctgacttcttgggcggcttcgccggcctgcccagcttgggttttggcaatctgctcagctttgccagtttgcccaccgtgggtcaggtgaccgccaccatgggtcagctgcaacagctcgtggcggccggcggtggccccagccaactggccagcatgggcagccaacaagcgcaactgatctcgtcgcaggcccagcaaggaggccagcagcacgccaccctcgtgagcgacaagaaggaagacgaggaaggcgtggccgaggcggagcgtgcacccatcgacgctggcaccgcggccagccaacgggggcaggaggggaccgtcctttgactcgagtaagcggccgcactcgagcaccaccaccaccaccactgagatccggctgctaacaaagcccgaaaggaagctgagttggctgctgccaccgctgagcaataactagcataaccccttggggcctctaaacgggtcttgaggggttttttgctgaaaggaggaactatatccggat

SEQ ID NO: 199 - protein, 599 aa, Artificial Sequence
  Description of Artificial Sequence: Synthetic polypeptide
MGSSHHHHHHSSGLVPRGSHMASMDLDAVRIKVDTVNAKPGDTVNIPVRFSGIPSKGIANCDFVYSYDPNVLEIIEIKPGELIVDPNPTKSFDTAVYPDRKMIVFLFAEDSGTGAYAITKDGVFATIVAKVKEGAPNGLSVIKFVEVGGFANNDLVEQKTQFFDGGVNVGDTTEPATPTTPVTTPTTTDDLDAASMASGSGLCKTTSNFIWGQLLLLGEGIPDPGDIFNTGSSLFKQISDKMGLAIPGTNWIGQAAEAYLNQNIAQQLRAQVMGDLDKLTGNMISNQAKYVSDTRDVLRAMKKMIDGVYKVCKGLEKIPLLGHLWSWELAIPMSGIAMAVVGGALLYLTIMTLMNATNLRGILGRLIEMLTTLPKFPGLPGLPSLPDIIDGLWPPKLPDIPIPGLPDIPGLPDFKWPPTPGSPLFPDLPSFPGFPGFPEFPAIPGFPALPGLPSIPNLFPGLPGLGDLLPGVGDLGKLPTWTELAALPDFLGGFAGLPSLGFGNLLSFASLPTVGQVTATMGQLQQLVAAGGGPSQLASMGSQQAQLISSQAQQGGQQHATLVSDKKEDEEGVAEAERAPIDAGTAASQRGQEGTVLLE

SEQ ID NO: 200 - DNA, 7216 bp, Artificial Sequence
  Description of Artificial Sequence: Synthetic polynucleotide
tggcgaatgggacgcgccctgtagcggcgcattaagcgcggcgggtgtggtggttacgcgcagcgtgaccgctacacttgccagcgccctagcgcccgctcctttcgctttcttcccttcctttctcgccacgttcgccggctttccccgtcaagctctaaatcgggggctccctttagggttccgatttagtgctttacggcacctcgaccccaaaaaacttgattagggtgatggttcacgtagtgggccatcgccctgatagacggtttttcgccctttgacgttggagtccacgttctttaatagtggactcttgttccaaactggaacaacactcaaccctatctcggtctattcttttgatttataagggattttgccgatttcggcctattggttaaaaaatgagctgatttaacaaaaatttaacgcgaattttaacaaaatattaacgtttacaatttcaggtggcacttttcggggaaatgtgcgcggaacccctatttgtttatttttctaaatacattcaaatatgtatccgctcatgaattaattcttagaaaaactcatcgagcatcaaatgaaactgcaatttattcatatcaggattatcaataccatatttttgaaaaagccgtttctgtaatgaaggagaaaactcaccgaggcagttccataggatggcaagatcctggtatcggtctgcgattccgactcgtccaacatcaatacaacctattaatttcccctcgtcaaaaataaggttatcaagtgagaaatcaccatgagtgacgactgaatccggtgagaatggcaaaagtttatgcatttctttccagacttgttcaacaggccagccattacgctcgtcatcaaaatcactcgcatcaaccaaaccgttattcattcgtgattgcgcctgagcgagacgaaatacgcgatcgctgttaaaaggacaattacaaacaggaatcgaatgcaaccggcgcaggaacactgccagcgcatcaacaatattttcacctgaatcaggatattcttctaatacctggaatgctgttttcccggggatcgcagtggtgagtaaccatgcatcatcaggagtacggataaaatgcttgatggtcggaagaggcataaattccgtcagccagtttagtctgaccatctcatctgtaacatcattggcaacgctacctttgccatgtttcagaaacaactctggcgcatcgggcttcccatacaatcgatagattgtcgcacctgattgcccgacattatcgcgagcccatttatacccatataaatcagcatccatgttggaatttaatcgcggcctagagcaagacgtttcccgttgaatatggctcataacaccccttgtattactgtttatgtaagcagacagttttattgttcatgaccaaaatcccttaacgtgagttttcgttccactgagcgtcagaccccgtagaaaagatcaaaggatcttcttgagatcctttttttctgcgcgtaatctgctgcttgcaaacaaaaaaaccaccgctaccagcggtggtttgtttgccggatcaagagctaccaactctttttccgaaggtaactggcttcagcagagcgcagataccaaatactgtccttctagtgtagccgtagttaggccaccacttcaagaactctgtagcaccgcctacatacctcgctctgctaatcctgttaccagtggctgctgccagtggcgataagtcgtgtcttaccgggttggactcaagacgatagttaccggataaggcgcagcggtcgggctgaacggggggttcgtgcacacagcccagcttggagcgaacgacctacaccgaactgagatacctacagcgtgagctatgagaaagcgccacgcttcccgaagggagaaaggcggacaggtatccggtaagcggcagggtcggaacaggagagcgcacgagggagcttccagggggaaacgcctggtatctttatagtcctgtcgggtttcgccacctctgacttgagcgtcgatttttgtgatgctcgtcaggggggcggagcctatggaaaaacgccagcaacgcggcctttttacggttcctggccttttgctggccttttgctcacatgttctttcctgcgttatcccctgattctgtggataaccgtattaccgcctttgagtgagctgataccgctcgccgcagccgaacgaccgagcgcagcgagtcagtgagcgaggaagcggaagagcgcctgatgcggtattttctccttacgcatctgtgcggtatttcacaccgcatatatggtgcactctcagtacaatctgctctgatgccgcatagttaagccagtatacactccgctatcgctacgtgactgggtcatggctgcgccccgacacccgccaacacccgctgacgcgccctgacgggcttgtctgctcccggcatccgcttacagacaagctgtgaccgtctccgggagctgcatgtgtcagaggttttcaccgtcatcaccgaaacgcgcgaggcagctgcggtaaagctcatcagcgtggtcgtgaagcgattcacagatgtctgcctgttcatccgcgtccagctcgttgagtttctccagaagcgttaatgtctggcttctgataaagcgggccatgttaagggcggttttttcctgtttggtcactgatgcctccgtgtaagggggatttctgttcatgggggtaatgataccgatgaaacgagagaggatgctcacgatacgggttactgatgatgaacatgcccggttactggaacgttgtgagggtaaacaactggcggtatggatgcggcgggaccagagaaaaatcactcagggtcaatgccagcgcttcgttaatacagatgtaggtgttccacagggtagccagcagcatcctgcgatgcagatccggaacataatggtgcagggcgctgacttccgcgtttccagactttacgaaacacggaaaccgaagaccattcatgttgttgctcaggtcgcagacgttttgcagcagcagtcgcttcacgttcgctcgcgtatcggtgattcattctgctaaccagtaaggcaaccccgccagcctagccgggtcctcaacgacaggagcacgatcatgcgcacccgtggggccgccatgccggcgataatggcctgcttctcgccgaaacgtttggtggcgggaccagtgacgaaggcttgagcgagggcgtgcaagattccgaataccgcaagcgacaggccgatcatcgtcgcgctccagcgaaagcggtcctcgccgaaaatgacccagagcgctgccggcacctgtcctacgagttgcatgataaagaagacagtcataagtgcggcgacgatagtcatgccccgcgcccaccggaaggagctgactgggttgaaggctctcaagggcatcggtcgagatcccggtgcctaatgagtgagctaacttacattaattgcgttgcgctcactgcccgctttccagtcgggaaacctgtcgtgccagctgcattaatgaatcggccaacgcgcggggagaggcggtttgcgtattgggcgccagggtggtttttcttttcaccagtgagacgggcaacagctgattgcccttcaccgcctggccctgagagagttgcagcaagcggtccacgctggtttgccccagcaggcgaaaatcctgtttgatggtggttaacggcgggatataacatgagctgtcttcggtatcgtcgtatcccactaccgagatatccgcaccaacgcgcagcccggactcggtaatggcgcgcattgcgcccagcgccatctgatcgttggcaaccagcatcgcagtgggaacgatgccctcattcagcatttgcatggtttgttgaaaaccggacatggcactccagtcgccttcccgttccgctatcggctgaatttgattgcgagtgagatatttatgccagccagccagacgcagacgcgccgagacagaacttaatgggcccgctaacagcgcgatttgctggtgacccaatgcgaccagatgctccacgcccagtcgcgtaccgtcttcatgggagaaaataatactgttgatgggtgtctggtcagagacatcaagaaataacgccggaacattagtgcaggcagcttccacagcaatggcatcctggtcatccagcggatagttaatgatcagcccactgacgcgttgcgcgagaagattgtgcaccgccgctttacaggcttcgacgccgcttcgttctaccatcgacaccaccacgctggcacccagttgatcggcgcgagatttaatcgccgcgacaatttgcgacggcgcgtgcagggccagactggaggtggcaacgccaatcagcaacgactgtttgcccgccagttgttgtgccacgcggttgggaatgtaattcagctccgccatcgccgcttccactttttcccgcgttttcgcagaaacgtggctggcctggttcaccacgcgggaaacggtctgataagagacaccggcatactctgcgacatcgtataacgttactggtttcacattcaccaccctgaattgactctcttccgggcgctatcatgccataccgcgaaaggttttgcgccattcgatggtgtccgggatctcgacgctctcccttatgcgactcctgcattaggaagcagcccagtagtaggttgaggccgttgagcaccgccgccgcaaggaatggtgcatgcaaggagatggcgcccaacagtcccccggccacggggcctgccaccatacccacgccgaaacaagcgctcatgagcccgaagtggcgagcccgatcttccccatcggtgatgtcggcgatataggcgccagcaaccgcacctgtggcgccggtgatgccggccacgatgcgtccggcgtagaggatcgagatctcgatcccgcgaaattaatacgactcactataggggaattgtgagcggataacaattcccctctagaaataattttgtttaactttaagaaggagatataccatgggcagcagccatcatcatcatcatcacagcagcggcctggtgccgcgcggcagccatatggctagtatggatctggatgcagtaaggattaaagtggacacagtaaatgcaaaaccgggagacacagtaaatatacctgtaagattcagtggtataccatccaagggaatagcaaactgtgactttgtatacagctatgacccgaatgtacttgagataatagagataaaaccgggagaattgatagttgacccgaatcctaccaagagctttgatactgcagtatatcctgacagaaagatgatagtattcctgtttgcggaagacagcggaacaggagcgtatgcaataactaaagacggagtatttgctacgatagtagcgaaagtaaaagaaggagcacctaacgggctcagtgtaatcaaatttgtagaagtaggcggatttgcgaacaatgaccttgtagaacagaagacacagttctttgacggtggagtaaatgttggagatacaacagaacctgcaacacctacaacacctgtaacaacaccgacaacaacagatgatctagatgcagctagcatgacgcagtcgcagaccgtgacggtggatcagcaagagattttgaacagggccaacgaggtggaggccccgatggcggacccaccgactgatgtccccatcacaccgtgcgaactcacggcggctaaaaacgccgcccaacagctggtattgtccgccgacaacatgcgggaatacctggcggccggtgccaaagagcggcagcgtctggcgacctcgctgcgcaacgcggccaaggcgtatggcgaggttgatgaggaggctgcgaccgcgctggacaacgacggcgaaggaactgtgcaggcagaatcggccggggccgtcggaggggacagttcggccgaactaaccgatacgccgagggtggccacggccggtgaacccaacttcatggatctcaaagaagcggcaaggaagctcgaaacgggcgaccaaggcgcatcgctcgcgcactttgcggatgggtggaacactttcaacctgacgctgcaaggcgacgtcaagcggttccgggggtttgacaactgggaaggcgatgcggctaccgcttgcgaggcttcgctcgatcaacaacggcaatggatactccacatggccaaattgagcgctgcgatggccaagcaggctcaatatgtcgcgcagctgcacgtgtgggctaggcgggaacatccgacttatgaagacatagtcgggctcgaacggctttacgcggaaaacccttcggcccgcgaccaaattctcccggtgtacgcggagtatcagcagaggtcggagaaggtgctgaccgaatacaacaacaaggcagccctggaaccggtaaacccgccgaagcctccccccgccatcaagatcgacccgcccccgcctccgcaagagcagggattgatccctggcttcctgatgccgccgtctgacggctccggtgtgactcccggtaccgggatgccagccgcaccgatggttccgcctaccggatcgccgggtggtggcctcccggctgacacggcggcgcagctgacgtcggctgggcgggaagccgcagcgctgtcgggcgacgtggcggtcaaagcggcatcgctcggtggcggtggaggcggcggggtgccgtcggcgccgttgggatccgcgatcgggggcgccgaatcggtgcggcccgctggcgctggtgacattgccggcttaggccagggaagggccggcggcggcgccgcgctgggcggcggtggcatgggaatgccgatgggtgccgcgcatcagggacaagggggcgccaagtccaagggttctcagcaggaagacgaggcgctctacaccgaggatcgggcatggaccgaggccgtcattggtaaccgtcggcgccaggacagtaaggagtcgaaggaattctgagcggccgcactcgagcaccaccaccaccaccactgagatccggctgctaacaaagcccgaaaggaagctgagttggctgctgccaccgctgagcaataactagcataaccccttggggcctctaaacgggtcttgaggggttttttgctgaaaggaggaactatatccggat

SEQ ID NO: 201 - protein, 655 aa, Artificial Sequence
  Description of Artificial Sequence: Synthetic polypeptide
MGSSHHHHHHSSGLVPRGSHMASMDLDAVRIKVDTVNAKPGDTVNIPVRFSGIPSKGIANCDFVYSYDPNVLEIIEIKPGELIVDPNPTKSFDTAVYPDRKMIVFLFAEDSGTGAYAITKDGVFATIVAKVKEGAPNGLSVIKFVEVGGFANNDLVEQKTQFFDGGVNVGDTTEPATPTTPVTTPTTTDDLDAASMTQSQTVTVDQQEILNRANEVEAPMADPPTDVPITPCELTAAKNAAQQLVLSADNMREYLAAGAKERQRLATSLRNAAKAYGEVDEEAATALDNDGEGTVQAESAGAVGGDSSAELTDTPRVATAGEPNFMDLKEAARKLETGDQGASLAHFADGWNTFNLTLQGDVKRFRGFDNWEGDAATACEASLDQQRQWILHMAKLSAAMAKQAQYVAQLHVWARREHPTYEDIVGLERLYAENPSARDQILPVYAEYQQRSEKVLTEYNNKAALEPVNPPKPPPAIKIDPPPPPQEQGLIPGFLMPPSDGSGVTPGTGMPAAPMVPPTGSPGGGLPADTAAQLTSAGREAAALSGDVAVKAASLGGGGGGGVPSAPLGSAIGGAESVRPAGAGDIAGLGQGRAGGGAALGGGGMGMPMGAAHQGQGGAKSKGSQQEDEALYTEDRAWTEAVIGNRRRQDSKESK

SEQ ID NO: 202 - DNA, 6061 bp, Artificial Sequence
  Description of Artificial Sequence: Synthetic polynucleotide
tggcgaatgggacgcgccctgtagcggcgcattaagcgcggcgggtgtggtggttacgcgcagcgtgaccgctacacttgccagcgccctagcgcccgctcctttcgctttcttcccttcctttctcgccacgttcgccggctttccccgtcaagctctaaatcgggggctccctttagggttccgatttagtgctttacggcacctcgaccccaaaaaacttgattagggtgatggttcacgtagtgggccatcgccctgatagacggtttttcgccctttgacgttggagtccacgttctttaatagtggactcttgttccaaactggaacaacactcaaccctatctcggtctattcttttgatttataagggattttgccgatttcggcctattggttaaaaaatgagctgatttaacaaaaatttaacgcgaattttaacaaaatattaacgtttacaatttcaggtggcacttttcggggaaatgtgcgcggaacccctatttgtttatttttctaaatacattcaaatatgtatccgctcatgaattaattcttagaaaaactcatcgagcatcaaatgaaactgcaatttattcatatcaggattatcaataccatatttttgaaaaagccgtttctgtaatgaaggagaaaactcaccgaggcagttccataggatggcaagatcctggtatcggtctgcgattccgactcgtccaacatcaatacaacctattaatttcccctcgtcaaaaataaggttatcaagtgagaaatcaccatgagtgacgactgaatccggtgagaatggcaaaagtttatgcatttctttccagacttgttcaacaggccagccattacgctcgtcatcaaaatcactcgcatcaaccaaaccgttattcattcgtgattgcgcctgagcgagacgaaatacgcgatcgctgttaaaaggacaattacaaacaggaatcgaatgcaaccggcgcaggaacactgccagcgcatcaacaatattttcacctgaatcaggatattcttctaatacctggaatgctgttttcccggggatcgcagtggtgagtaaccatgcatcatcaggagtacggataaaatgcttgatggtcggaagaggcataaattccgtcagccagtttagtctgaccatctcatctgtaacatcattggcaacgctacctttgccatgtttcagaaacaactctggcgcatcgggcttcccatacaatcgatagattgtcgcacctgattgcccgacattatcgcgagcccatttatacccatataaatcagcatccatgttggaatttaatcgcggcctagagcaagacgtttcccgttgaatatggctcataacaccccttgtattactgtttatgtaagcagacagttttattgttcatgaccaaaatcccttaacgtgagttttcgttccactgagcgtcagaccccgtagaaaagatcaaaggatcttcttgagatcctttttttctgcgcgtaatctgctgcttgcaaacaaaaaaaccaccgctaccagcggtggtttgtttgccggatcaagagctaccaactctttttccgaaggtaactggcttcagcagagcgcagataccaaatactgtccttctagtgtagccgtagttaggccaccacttcaagaactctgtagcaccgcctacatacctcgctctgctaatcctgttaccagtggctgctgccagtggcgataagtcgtgtcttaccgggttggactcaagacgatagttaccggataaggcgcagcggtcgggctgaacggggggttcgtgcacacagcccagcttggagcgaacgacctacaccgaactgagatacctacagcgtgagctatgagaaagcgccacgcttcccgaagggagaaaggcggacaggtatccggtaagcggcagggtcggaacaggagagcgcacgagggagcttccagggggaaacgcctggtatctttatagtcctgtcgggtttcgccacctctgacttgagcgtcgatttttgtgatgctcgtcaggggggcggagcctatggaaaaacgccagcaacgcggcctttttacggttcctggccttttgctggccttttgctcacatgttctttcctgcgttatcccctgattctgtggataaccgtattaccgcctttgagtgagctgataccgctcgccgcagccgaacgaccgagcgcagcgagtcagtgagcgaggaagcggaagagcgcctgatgcggtattttctccttacgcatctgtgcggtatttcacaccgcatatatggtgcactctcagtacaatctgctctgatgccgcatagttaagccagtatacactccgctatcgctacgtgactgggtcatggctgcgccccgacacccgccaacacccgctgacgcgccctgacgggcttgtctgctcccggcatccgcttacagacaagctgtgaccgtctccgggagctgcatgtgtcagaggttttcaccgtcatcaccgaaacgcgcgaggcagctgcggtaaagctcatcagcgtggtcgtgaagcgattcacagatgtctgcctgttcatccgcgtccagctcgttgagtttctccagaagcgttaatgtctggcttctgataaagcgggccatgttaagggcggttttttcctgtttggtcactgatgcctccgtgtaagggggatttctgttcatgggggtaatgataccgatgaaacgagagaggatgctcacgatacgggttactgatgatgaacatgcccggttactggaacgttgtgagggtaaacaactggcggtatggatgcggcgggaccagagaaaaatcactcagggtcaatgccagcgcttcgttaatacagatgtaggtgttccacagggtagccagcagcatcctgcgatgcagatccggaacataatggtgcagggcgctgacttccgcgtttccagactttacgaaacacggaaaccgaagaccattcatgttgttgctcaggtcgcagacgttttgcagcagcagtcgcttcacgttcgctcgcgtatcggtgattcattctgctaaccagtaaggcaaccccgccagcctagccgggtcctcaacgacaggagcacgatcatgcgcacccgtggggccgccatgccggcgataatggcctgcttctcgccgaaacgtttggtggcgggaccagtgacgaaggcttgagcgagggcgtgcaagattccgaataccgcaagcgacaggccgatcatcgtcgcgctccagcgaaagcggtcctcgccgaaaatgacccagagcgctgccggcacctgtcctacgagttgcatgataaagaagacagtcataagtgcggcgacgatagtcatgccccgcgcccaccggaaggagctgactgggttgaaggctctcaagggcatcggtcgagatcccggtgcctaatgagtgagctaacttacattaattgcgttgcgctcactgcccgctttccagtcgggaaacctgtcgtgccagctgcattaatgaatcggccaacgcgcggggagaggcggtttgcgtattgggcgccagggtggtttttcttttcaccagtgagacgggcaacagctgattgcccttcaccgcctggccctgagagagttgcagcaagcggtccacgctggtttgccccagcaggcgaaaatcctgtttgatggtggttaacggcgggatataacatgagctgtcttcggtatcgtcgtatcccactaccgagatatccgcaccaacgcgcagcccggactcggtaatggcgcgcattgcgcccagcgccatctgatcgttggcaaccagcatcgcagtgggaacgatgccctcattcagcatttgcatggtttgttgaaaaccggacatggcactccagtcgccttcccgttccgctatcggctgaatttgattgcgagtgagatatttatgccagccagccagacgcagacgcgccgagacagaacttaatgggcccgctaacagcgcgatttgctggtgacccaatgcgaccagatgctccacgcccagtcgcgtaccgtcttcatgggagaaaataatactgttgatgggtgtctggtcagagacatcaagaaataacgccggaacattagtgcaggcagcttccacagcaatggcatcctggtcatccagcggatagttaatgatcagcccactgacgcgttgcgcgagaagattgtgcaccgccgctttacaggcttcgacgccgcttcgttctaccatcgacaccaccacgctggcacccagttgatcggcgcgagatttaatcgccgcgacaatttgcgacggcgcgtgcagggccagactggaggtggcaacgccaatcagcaacgactgtttgcccgccagttgttgtgccacgcggttgggaatgtaattcagctccgccatcgccgcttccactttttcccgcgttttcgcagaaacgtggctggcctggttcaccacgcgggaaacggtctgataagagacaccggcatactctgcgacatcgtataacgttactggtttcacattcaccaccctgaattgactctcttccgggcgctatcatgccataccgcgaaaggttttgcgccattcgatggtgtccgggatctcgacgctctcccttatgcgactcctgcattaggaagcagcccagtagtaggttgaggccgttgagcaccgccgccgcaaggaatggtgcatgcaaggagatggcgcccaacagtcccccggccacggggcctgccaccatacccacgccgaaacaagcgctcatgagcccgaagtggcgagcccgatcttccccatcggtgatgtcggcgatataggcgccagcaaccgcacctgtggcgccggtgatgccggccacgatgcgtccggcgtagaggatcgagatctcgatcccgcgaaattaatacgactcactataggggaattgtgagcggataacaattcccctctagaaataattttgtttaactttaagaaggagatataccatgggcagcagccatcatcatcatcatcacagcagcggcctggtgccgcgcggcagccatatggctagtatggatctggatgcagtaaggattaaagtggacacagtaaatgcaaaaccgggagacacagtaaatatacctgtaagattcagtggtataccatccaagggaatagcaaactgtgactttgtatacagctatgacccgaatgtacttgagataatagagataaaaccgggagaattgatagttgacccgaatcctaccaagagctttgatactgcagtatatcctgacagaaagatgatagtattcctgtttgcggaagacagcggaacaggagcgtatgcaataactaaagacggagtatttgctacgatagtagcgaaagtaaaagaaggagcacctaacgggctcagtgtaatcaaatttgtagaagtaggcggatttgcgaacaatgaccttgtagaacagaagacacagttctttgacggtggagtaaatgttggagatacaacagaacctgcaacacctacaacacctgtaacaacaccgacaacaacagatgatctagatgcagctagtgtgatagcgggcgtcgaccaggcgcttgcagcaacaggccaggctagccagcgggcggcaggcgcatctggtggggtcaccgtcggtgtcggcgtgggcacggaacagaggaacctttcggtggttgcaccgagtcagttcacatttagttcacgcagcccagattttgtggatgaaaccgcaggtcaatcgtggtgcgcgatactgggattgaaccagtttcacgaattctaggcggccgcactcgagcaccaccaccaccaccactgagatccggctgctaacaaagcccgaaaggaagctgagttggctgctgccaccgctgagcaataactagcataaccccttggggcctctaaacgggtcttgaggggttttttgctgaaaggaggaactatatccggat

SEQ ID NO: 203 - protein, 272 aa, Artificial Sequence
  Description of Artificial Sequence: Synthetic polypeptide
MGSSHHHHHHSSGLVPRGSHMASMDLDAVRIKVDTVNAKPGDTVNIPVRFSGIPSKGIANCDFVYSYDPNVLEIIEIKPGELIVDPNPTKSFDTAVYPDRKMIVFLFAEDSGTGAYAITKDGVFATIVAKVKEGAPNGLSVIKFVEVGGFANNDLVEQKTQFFDGGVNVGDTTEPATPTTPVTTPTTTDDLDAASVIAGVDQALAATGQASQRAAGASGGVTVGVGVGTEQRNLSVVAPSQFTFSSRSPDFVDETAGQSWCAILGLNQFHEF

SEQ ID NO: 204 - DNA, 6412 bp, Artificial Sequence
  Description of Artificial Sequence: Synthetic polynucleotide
tggcgaatgggacgcgccctgtagcggcgcattaagcgcggcgggtgtggtggttacgcgcagcgtgaccgctacacttgccagcgccctagcgcccgctcctttcgctttcttcccttcctttctcgccacgttcgccggctttccccgtcaagctctaaatcgggggctccctttagggttccgatttagtgctttacggcacctcgaccccaaaaaacttgattagggtgatggttcacgtagtgggccatcgccctgatagacggtttttcgccctttgacgttggagtccacgttctttaatagtggactcttgttccaaactggaacaacactcaaccctatctcggtctattcttttgatttataagggattttgccgatttcggcctattggttaaaaaatgagctgatttaacaaaaatttaacgcgaattttaacaaaatattaacgtttacaatttcaggtggcacttttcggggaaatgtgcgcggaacccctatttgtttatttttctaaatacattcaaatatgtatccgctcatgaattaattcttagaaaaactcatcgagcatcaaatgaaactgcaatttattcatatcaggattatcaataccatatttttgaaaaagccgtttctgtaatgaaggagaaaactcaccgaggcagttccataggatggcaagatcctggtatcggtctgcgattccgactcgtccaacatcaatacaacctattaatttcccctcgtcaaaaataaggttatcaagtgagaaatcaccatgagtgacgactgaatccggtgagaatggcaaaagtttatgcatttctttccagacttgttcaacaggccagccattacgctcgtcatcaaaatcactcgcatcaaccaaaccgttattcattcgtgattgcgcctgagcgagacgaaatacgcgatcgctgttaaaaggacaattacaaacaggaatcgaatgcaaccggcgcaggaacactgccagcgcatcaacaatattttcacctgaatcaggatattcttctaatacctggaatgctgttttcccggggatcgcagtggtgagtaaccatgcatcatcaggagtacggataaaatgcttgatggtcggaagaggcataaattccgtcagccagtttagtctgaccatctcatctgtaacatcattggcaacgctacctttgccatgtttcagaaacaactctggcgcatcgggcttcccatacaatcgatagattgtcgcacctgattgcccgacattatcgcgagcccatttatacccatataaatcagcatccatgttggaatttaatcgcggcctagagcaagacgtttcccgttgaatatggctcataacaccccttgtattactgtttatgtaagcagacagttttattgttcatgaccaaaatcccttaacgtgagttttcgttccactgagcgtcagaccccgtagaaaagatcaaaggatcttcttgagatcctttttttctgcgcgtaatctgctgcttgcaaacaaaaaaaccaccgctaccagcggtggtttgtttgccggatcaagagctaccaactctttttccgaaggtaactggcttcagcagagcgcagataccaaatactgtccttctagtgtagccgtagttaggccaccacttcaagaactctgtagcaccgcctacatacctcgctctgctaatcctgttaccagtggctgctgccagtggcgataagtcgtgtcttaccgggttggactcaagacgatagttaccggataaggcgcagcggtcgggctgaacggggggttcgtgcacacagcccagcttggagcgaacgacctacaccgaactgagatacctacagcgtgagctatgagaaagcgccacgcttcccgaagggagaaaggcggacaggtatccggtaagcggcagggtcggaacaggagagcgcacgagggagcttccagggggaaacgcctggtatctttatagtcctgtcgggtttcgccacctctgacttgagcgtcgatttttgtgatgctcgtcaggggggcggagcctatggaaaaacgccagcaacgcggcctttttacggttcctggccttttgctggccttttgctcacatgttctttcctgcgttatcccctgattctgtggataaccgtattaccgcctttgagtgagctgataccgctcgccgcagccgaacgaccgagcgcagcgagtcagtgagcgaggaagcggaagagcgcctgatgcggtattttctccttacgcatctgtgcggtatttcacaccgcatatatggtgcactctcagtacaatctgctctgatgccgcatagttaagccagtatacactccgctatcgctacgtgactgggtcatggctgcgccccgacacccgccaacacccgctgacgcgccctgacgggcttgtctgctcccggcatccgcttacagacaagctgtgaccgtctccgggagctgcatgtgtcagaggttttcaccgtcatcaccgaaacgcgcgaggcagctgcggtaaagctcatcagcgtggtcgtgaagcgattcacagatgtctgcctgttcatccgcgtccagctcgttgagtttctccagaagcgttaatgtctggcttctgataaagcgggccatgttaagggcggttttttcctgtttggtcactgatgcctccgtgtaagggggatttctgttcatgggggtaatgataccgatgaaacgagagaggatgctcacgatacgggttactgatgatgaacatgcccggttactggaacgttgtgagggtaaacaactggcggtatggatgcggcgggaccagagaaaaatcactcagggtcaatgccagcgcttcgttaatacagatgtaggtgttccacagggtagccagcagcatcctgcgatgcagatccggaacataatggtgcagggcgctgacttccgcgtttccagactttacgaaacacggaaaccgaagaccattcatgttgttgctcaggtcgcagacgttttgcagcagcagtcgcttcacgttcgctcgcgtatcggtgattcattctgctaaccagtaaggcaaccccgccagcctagccgggtcctcaacgacaggagcacgatcatgcgcacccgtggggccgccatgccggcgataatggcctgcttctcgccgaaacgtttggtggcgggaccagtgacgaaggcttgagcgagggcgtgcaagattccgaataccgcaagcgacaggccgatcatcgtcgcgctccagcgaaagcggtcctcgccgaaaatgacccagagcgctgccggcacctgtcctacgagttgcatgataaagaagacagtcataagtgcggcgacgatagtcatgccccgcgcccaccggaaggagctgactgggttgaaggctctcaagggcatcggtcgagatcccggtgcctaatgagtgagctaacttacattaattgcgttgcgctcactgcccgctttccagtcgggaaacctgtcgtgccagctgcattaatgaatcggccaacgcgcggggagaggcggtttgcgtattgggcgccagggtggtttttcttttcaccagtgagacgggcaacagctgattgcccttcaccgcctggccctgagagagttgcagcaagcggtccacgctggtttgccccagcaggcgaaaatcctgtttgatggtggttaacggcgggatataacatgagctgtcttcggtatcgtcgtatcccactaccgagatatccgcaccaacgcgcagcccggactcggtaatggcgcgcattgcgcccagcgccatctgatcgttggcaaccagcatcgcagtgggaacgatgccctcattcagcatttgcatggtttgttgaaaaccggacatggcactccagtcgccttcccgttccgctatcggctgaatttgattgcgagtgagatatttatgccagccagccagacgcagacgcgccgagacagaacttaatgggcccgctaacagcgcgatttgctggtgacccaatgcgaccagatgctccacgcccagtcgcgtaccgtcttcatgggagaaaataatactgttgatgggtgtctggtcagagacatcaagaaataacgccggaacattagtgcaggcagcttccacagcaatggcatcctggtcatccagcggatagttaatgatcagcccactgacgcgttgcgcgagaagattgtgcaccgccgctttacaggcttcgacgccgcttcgttctaccatcgacaccaccacgctggcacccagttgatcggcgcgagatttaatcgccgcgacaatttgcgacggcgcgtgcagggccagactggaggtggcaacgccaatcagcaacgactgtttgcccgccagttgttgtgccacgcggttgggaatgtaattcagctccgccatcgccgcttccactttttcccgcgttttcgcagaaacgtggctggcctggttcaccacgcgggaaacggtctgataagagacaccggcatactctgcgacatcgtataacgttactggtttcacattcaccaccctgaattgactctcttccgggcgctatcatgccataccgcgaaaggttttgcgccattcgatggtgtccgggatctcgacgctctcccttatgcgactcctgcattaggaagcagcccagtagtaggttgaggccgttgagcaccgccgccgcaaggaatggtgcatgcaaggagatggcgcccaacagtcccccggccacggggcctgccaccatacccacgccgaaacaagcgctcatgagcccgaagtggcgagcccgatcttccccatcggtgatgtcggcgatataggcgccagcaaccgcacctgtggcgccggtgatgccggccacgatgcgtccggcgtagaggatcgagatctcgatcccgcgaaattaatacgactcactataggggaattgtgagcggataacaattcccctctagaaataattttgtttaactttaagaaggagatataccatgggcagcagccatcatcatcatcatcacagcagcggcctggtgccgcgcggcagccatatggctagtatggatctggatgcagtaaggattaaagtggacacagtaaatgcaaaaccgggagacacagtaaatatacctgtaagattcagtggtataccatccaagggaatagcaaactgtgactttgtatacagctatgacccgaatgtacttgagataatagagataaaaccgggagaattgatagttgacccgaatcctaccaagagctttgatactgcagtatatcctgacagaaagatgatagtattcctgtttgcggaagacagcggaacaggagcgtatgcaataactaaagacggagtatttgctacgatagtagcgaaagtaaaagaaggagcacctaacgggctcagtgtaatcaaatttgtagaagtaggcggatttgcgaacaatgaccttgtagaacagaagacacagttctttgacggtggagtaaatgttggagatacaacagaacctgcaacacctacaacacctgtaacaacaccgacaacaacagatgatctagatgcagctagcaaacccgtgtcgcaagacaccagcccgaaaccggcgaccagcccggcggcgcccgttaccacggcggcaatggctgaccccgcagcggacctgattggtcgtgggtgcgcgcaatacgcggcgcaaaatcccaccggtcccggatcggtggccggaatggcgcaagacccggtcgctaccgcggcttccaacaacccgatgctcagtaccctgacctcggctctgtcgggcaagctgaacccggatgtgaatctggtcgacaccctcaacggcggcgagtacaccgttttcgcccccaccaacgccgcattcgacaagctgccggcggccactatcgatcaactcaagactgacgccaagctgctcagcagcatcctgacctaccacgtgatagccggccaggcgagtccgagcaggatcgacggcacccatcagaccctgcaaggtgccgacctgacggtgataggcgcccgcgacgacctcatggtcaacaacgccggtttggtatgtggcggagttcacaccgccaacgcgacggtgtacatgatcgatacggtgctgatgcccccggcacaggaattctaagcggccgcactcgagcaccaccaccaccaccactgagatccggctgctaacaaagcccgaaaggaagctgagttggctgctgccaccgctgagcaataactagcataaccccttggggcctctaaacgggtcttgaggggttttttgctgaaaggaggaactatatccggat

SEQ ID NO: 205 - protein, 389 aa, Artificial Sequence
  Description of Artificial Sequence: Synthetic polypeptide
MGSSHHHHHHSSGLVPRGSHMASMDLDAVRIKVDTVNAKPGDTVNIPVRFSGIPSKGIANCDFVYSYDPNVLEIIEIKPGELIVDPNPTKSFDTAVYPDRKMIVFLFAEDSGTGAYAITKDGVFATIVAKVKEGAPNGLSVIKFVEVGGFANNDLVEQKTQFFDGGVNVGDTTEPATPTTPVTTPTTTDDLDAASKPVSQDTSPKPATSPAAPVTTAAMADPAADLIGRGCAQYAAQNPTGPGSVAGMAQDPVATAASNNPMLSTLTSALSGKLNPDVNLVDTLNGGEYTVFAPTNAAFDKLPAATIDQLKTDAKLLSSILTYHVIAGQASPSRIDGTHQTLQGADLTVIGARDDLMVNNAGLVCGGVHTANATVYMIDTVLMPPAQEF

SEQ ID NO: 206 - DNA, 6649 bp, Artificial Sequence
  Description of Artificial Sequence: Synthetic polynucleotide
tggcgaatgggacgcgccctgtagcggcgcattaagcgcggcgggtgtggtggttacgcgcagcgtgaccgctacacttgccagcgccctagcgcccgctcctttcgctttcttcccttcctttctcgccacgttcgccggctttccccgtcaagctctaaatcgggggctccctttagggttccgatttagtgctttacggcacctcgaccccaaaaaacttgattagggtgatggttcacgtagtgggccatcgccctgatagacggtttttcgccctttgacgttggagtccacgttctttaatagtggactcttgttccaaactggaacaacactcaaccctatctcggtctattcttttgatttataagggattttgccgatttcggcctattggttaaaaaatgagctgatttaacaaaaatttaacgcgaattttaacaaaatattaacgtttacaatttcaggtggcacttttcggggaaatgtgcgcggaacccctatttgtttatttttctaaatacattcaaatatgtatccgctcatgaattaattcttagaaaaactcatcgagcatcaaatgaaactgcaatttattcatatcaggattatcaataccatatttttgaaaaagccgtttctgtaatgaaggagaaaactcaccgaggcagttccataggatggcaagatcctggtatcggtctgcgattccgactcgtccaacatcaatacaacctattaatttcccctcgtcaaaaataaggttatcaagtgagaaatcaccatgagtgacgactgaatccggtgagaatggcaaaagtttatgcatttctttccagacttgttcaacaggccagccattacgctcgtcatcaaaatcactcgcatcaaccaaaccgttattcattcgtgattgcgcctgagcgagacgaaatacgcgatcgctgttaaaaggacaattacaaacaggaatcgaatgcaaccggcgcaggaacactgccagcgcatcaacaatattttcacctgaatcaggatattcttctaatacctggaatgctgttttcccggggatcgcagtggtgagtaaccatgcatcatcaggagtacggataaaatgcttgatggtcggaagaggcataaattccgtcagccagtttagtctgaccatctcatctgtaacatcattggcaacgctacctttgccatgtttcagaaacaactctggcgcatcgggcttcccatacaatcgatagattgtcgcacctgattgcccgacattatcgcgagcccatttatacccatataaatcagcatccatgttggaatttaatcgcggcctagagcaagacgtttcccgttgaatatggctcataacaccccttgtattactgtttatgtaagcagacagttttattgttcatgaccaaaatcccttaacgtgagttttcgttccactgagcgtcagaccccgtagaaaagatcaaaggatcttcttgagatcctttttttctgcgcgtaatctgctgcttgcaaacaaaaaaaccaccgctaccagcggtggtttgtttgccggatcaagagctaccaactctttttccgaaggtaactggcttcagcagagcgcagataccaaatactgtccttctagtgtagccgtagttaggccaccacttcaagaactctgtagcaccgcctacatacctcgctctgctaatcctgttaccagtggctgctgccagtggcgataagtcgtgtcttaccgggttggactcaagacgatagttaccggataaggcgcagcggtcgggctgaacggggggttcgtgcacacagcccagcttggagcgaacgacctacaccgaactgagatacctacagcgtgagctatgagaaagcgccacgcttcccgaagggagaaaggcggacaggtatccggtaagcggcagggtcggaacaggagagcgcacgagggagcttccagggggaaacgcctggtatctttatagtcctgtcgggtttcgccacctctgacttgagcgtcgatttttgtgatgctcgtcaggggggcggagcctatggaaaaacgccagcaacgcggcctttttacggttcctggccttttgctggccttttgctcacatgttctttcctgcgttatcccctgattctgtggataaccgtattaccgcctttgagtgagctgataccgctcgccgcagccgaacgaccgagcgcagcgagtcagtgagcgaggaagcggaagagcgcctgatgcggtattttctccttacgcatctgtgcggtatttcacaccgcatatatggtgcactctcagtacaatctgctctgatgccgcatagttaagccagtatacactccgctatcgctacgtgactgggtcatggctgcgccccgacacccgccaacacccgctgacgcgccctgacgggcttgtctgctcccggcatccgcttacagacaagctgtgaccgtctccgggagctgcatgtgtcagaggttttcaccgtcatcaccgaaacgcgcgaggcagctgcggtaaagctcatcagcgtggtcgtgaagcgattcacagatgtctgcctgttcatccgcgtccagctcgttgagtttctccagaagcgttaatgtctggcttctgataaagcgggccatgttaagggcggttttttcctgtttggtcactgatgcctccgtgtaagggggatttctgttcatgggggtaatgataccgatgaaacgagagaggatgctcacgatacgggttactgatgatgaacatgcccggttactggaacgttgtgagggtaaacaactggcggtatggatgcggcgggaccagagaaaaatcactcagggtcaatgccagcgcttcgttaatacagatgtaggtgttccacagggtagccagcagcatcctgcgatgcagatccggaacataatggtgcagggcgctgacttccgcgtttccagactttacgaaacacggaaaccgaagaccattcatgttgttgctcaggtcgcagacgttttgcagcagcagtcgcttcacgttcgctcgcgtatcggtgattcattctgctaaccagtaaggcaaccccgccagcctagccgggtcctcaacgacaggagcacgatcatgcgcacccgtggggccgccatgccggcgataatggcctgcttctcgccgaaacgtttggtggcgggaccagtgacgaaggcttgagcgagggcgtgcaagattccgaataccgcaagcgacaggccgatcatcgtcgcgctccagcgaaagcggtcctcgccgaaaatgacccagagcgctgccggcacctgtcctacgagttgcatgataaagaagacagtcataagtgcggcgacgatagtcatgccccgcgcccaccggaaggagctgactgggttgaaggctctcaagggcatcggtcgagatcccggtgcctaatgagtgagctaacttacattaattgcgttgcgctcactgcccgctttccagtcgggaaacctgtcgtgccagctgcattaatgaatcggccaacgcgcggggagaggcggtttgcgtattgggcgccagggtggtttttcttttcaccagtgagacgggcaacagctgattgcccttcaccgcctggccctgagagagttgcagcaagcggtccacgctggtttgccccagcaggcgaaaatcctgtttgatggtggttaacggcgggatataacatgagctgtcttcggtatcgtcgtatcccactaccgagatatccgcaccaacgcgcagcccggactcggtaatggcgcgcattgcgcccagcgccatctgatcgttggcaaccagcatcgcagtgggaacgatgccctcattcagcatttgcatggtttgttgaaaaccggacatggcactccagtcgccttcccgttccgctatcggctgaatttgattgcgagtgagatatttatgccagccagccagacgcagacgcgccgagacagaacttaatgggcccgctaacagcgcgatttgctggtgacccaatgcgaccagatgctccacgcccagtcgcgtaccgtcttcatgggagaaaataatactgttgatgggtgtctggtcagagacatcaagaaataacgccggaacattagtgcaggcagcttccacagcaatggcatcctggtcatccagcggatagttaatgatcagcccactgacgcgttgcgcgagaagattgtgcaccgccgctttacaggcttcgacgccgcttcgttctaccatcgacaccaccacgctggcacccagttgatcggcgcgagatttaatcgccgcgacaatttgcgacggcgcgtgcagggccagactggaggtggcaacgccaatcagcaacgactgtttgcccgccagttgttgtgccacgcggttgggaatgtaattcagctccgccatcgccgcttccactttttcccgcgttttcgcagaaacgtggctggcctggttcaccacgcgggaaacggtctgataagagacaccggcatactctgcgacatcgtataacgttactggtttcacattcaccaccctgaattgactctcttccgggcgctatcatgccataccgcgaaaggttttgcgccattcgatggtgtccgggatctcgacgctctcccttatgcgactcctgcattaggaagcagcccagtagtaggttgaggccgttgagcaccgccgccgcaaggaatggtgcatgcaaggagatggcgcccaacagtcccccggccacggggcctgccaccatacccacgccgaaacaagcgctcatgagcccgaagtggcgagcccgatcttccccatcggtgatgtcggcgatataggcgccagcaaccgcacctgtggcgccggtgatgccggccacgatgcgtccggcgtagaggatcgagatctcgatcccgcgaaattaatacgactcactataggggaattgtgagcggataacaattcccctctagaaataattttgtttaactttaagaaggagatataccatgggcagcagccatcatcatcatcatcacagcagcggcctggtgccgcgcggcagccatatggctagtatggatctggatgcagtaaggattaaagtggacacagtaaatgcaaaaccgggagacacagtaaatatacctgtaagattcagtggtataccatccaagggaatagcaaactgtgactttgtatacagctatgacccgaatgtacttgagataatagagataaaaccgggagaattgatagttgacccgaatcctaccaagagctttgatactgcagtatatcctgacagaaagatgatagtattcctgtttgcggaagacagcggaacaggagcgtatgcaataactaaagacggagtatttgctacgatagtagcgaaagtaaaagaaggagcacctaacgggctcagtgtaatcaaatttgtagaagtaggcggatttgcgaacaatgaccttgtagaacagaagacacagttctttgacggtggagtaaatgttggagatacaacagaacctgcaacacctacaacacctgtaacaacaccgacaacaacagatgatctagatgcagctagcatgctccccgagacaaatcaggatgaggtccagcccaacgcacccgttgccctggtgacggtggaaatccgtcacccgacaacggattcgctcaccgaatcagcgaaccgggagctcaaacacctgcttatcaatgatctaccgatcgaacgccaggcgcaggacgtcagctgggggatgacggcgcccggtggagcccccaccccggtcgcggatcgtttcgttcgttatgtcaatcgcgataacaccaccgccgcttcactgaagaaccaggcgatagtcgtggagaccaccgcctaccgcagctttgaggcctttaccgacgttgtgatgcgggtcgtggatgctcgcgcgcaggtctcgtcaatcgttgggttggagcgtatcggtcttcgctttgttctggagatccgcgtccccgcgggtgtcgacggccggatcacgtggagcaactggatcgacgagcagctgctcgggccgcagcgtttcactcccggcggcctggtcctgaccgagtggcagggtgccgcagtctaccgtgagctacaaccaggcaaatcgctcatcgtgcgctacggcccgggtatgggccaagcgcttgatcccaattaccatctgcgccgaataacacccgcccaaaccggaccattcttcctgctggacatcgatagcttttggactcccagtggcggctccattcccgagtacaacagggacgccttagtgtcgacattccaggacctgtacggtccggcccaggtcgtgtttcaggagatgatcaccagtcgcctgaaagatgagctgcttcgccaggaattctaagcggccgcactcgagcaccaccaccaccaccactgagatccggctgctaacaaagcccgaaaggaagctgagttggctgctgccaccgctgagcaataactagcataaccccttggggcctctaaacgggtcttgaggggttttttgctgaaaggaggaactatatccggat

SEQ ID NO: 207 - protein, 466 aa, Artificial Sequence
  Description of Artificial Sequence: Synthetic polypeptide
MGSSHHHHHHSSGLVPRGSHMASMDLDAVRIKVDTVNAKPGDTVNIPVRFSGIPSKGIANCDFVYSYDPNVLEIIEIKPGELIVDPNPTKSFDTAVYPDRKMIVFLFAEDSGTGAYAITKDGVFATIVAKVKEGAPNGLSVIKFVEVGGFANNDLVEQKTQFFDGGVNVGDTTEPATPTTPVTTPTTTDDLDAASMLPETNQDEVQPNAPVALVTVEIRHPTTDSLTESANRELKHLLINDLPIERQAQDVSWGMTAPGGAPTPVADRFVRYVNRDNTTAASLKNQAIVVETTAYRSFEAFTDVVMRVVDARAQVSSIVGLERIGLRFVLEIRVPAGVDGRITWSNWIDEQLLGPQRFTPGGLVLTEWQGAAVYRELQPGKSLIVRYGPGMGQALDPNYHLRRITPAQTGPFFLLDIDSFWTPSGGSIPEYNRDALVSTFQDLYGPAQVVFQEMITSRLKDELLRQ

SEQ ID NO: 208 - DNA, 6529 bp, Artificial Sequence
  Description of Artificial Sequence: Synthetic polynucleotide
tggcgaatgggacgcgccctgtagcggcgcattaagcgcggcgggtgtggtggttacgcgcagcgtgaccgctacacttgccagcgccctagcgcccgctcctttcgctttcttcccttcctttctcgccacgttcgccggctttccccgtcaagctctaaatcgggggctccctttagggttccgatttagtgctttacggcacctcgaccccaaaaaacttgattagggtgatggttcacgtagtgggccatcgccctgatagacggtttttcgccctttgacgttggagtccacgttctttaatagtggactcttgttccaaactggaacaacactcaaccctatctcggtctattcttttgatttataagggattttgccgatttcggcctattggttaaaaaatgagctgatttaacaaaaatttaacgcgaattttaacaaaatattaacgtttacaatttcaggtggcacttttcggggaaatgtgcgcggaacccctatttgtttatttttctaaatacattcaaatatgtatccgctcatgaattaattcttagaaaaactcatcgagcatcaaatgaaactgcaatttattcatatcaggattatcaataccatatttttgaaaaagccgtttctgtaatgaaggagaaaactcaccgaggcagttccataggatggcaagatcctggtatcggtctgcgattccgactcgtccaacatcaatacaacctattaatttcccctcgtcaaaaataaggttatcaagtgagaaatcaccatgagtgacgactgaatccggtgagaatggcaaaagtttatgcatttctttccagacttgttcaacaggccagccattacgctcgtcatcaaaatcactcgcatcaaccaaaccgttattcattcgtgattgcgcctgagcgagacgaaatacgcgatcgctgttaaaaggacaattacaaacaggaatcgaatgcaaccggcgcaggaacactgccagcgcatcaacaatattttcacctgaatcaggatattcttctaatacctggaatgctgttttcccggggatcgcagtggtgagtaaccatgcatcatcaggagtacggataaaatgcttgatggtcggaagaggcataaattccgtcagccagtttagtctgaccatctcatctgtaacatcattggcaacgctacctttgccatgtttcagaaacaactctggcgcatcgggcttcccatacaatcgatagattgtcgcacctgattgcccgacattatcgcgagcccatttatacccatataaatcagcatccatgttggaatttaatcgcggcctagagcaagacgtttcccgttgaatatggctcataacaccccttgtattactgtttatgtaagcagacagttttattgttcatgaccaaaatcccttaacgtgagttttcgttccactgagcgtcagaccccgtagaaaagatcaaaggatcttcttgagatcctttttttctgcgcgtaatctgctgcttgcaaacaaaaaaaccaccgctaccagcggtggtttgtttgccggatcaagagctaccaactctttttccgaaggtaactggcttcagcagagcgcagataccaaatactgtccttctagtgtagccgtagttaggccaccacttcaagaactctgtagcaccgcctacatacctcgctctgctaatcctgttaccagtggctgctgccagtggcgataagtcgtgtcttaccgggttggactcaagacgatagttaccggataaggcgcagcggtcgggctgaacggggggttcgtgcacacagcccagcttggagcgaacgacctacaccgaactgagatacctacagcgtgagctatgagaaagcgccacgcttcccgaagggagaaaggcggacaggtatccggtaagcggcagggtcggaacaggagagcgcacgagggagcttccagggggaaacgcctggtatctttatagtcctgtcgggtttcgccacctctgacttgagcgtcgatttttgtgatgctcgtcaggggggcggagcctatggaaaaacgccagcaacgcggcctttttacggttcctggccttttgctggccttttgctcacatgttctttcctgcgttatcccctgattctgtggataaccgtattaccgcctttgagtgagctgataccgctcgccgcagccgaacgaccgagcgcagcgagtcagtgagcgaggaagcggaagagcgcctgatgcggtattttctccttacgcatctgtgcggtatttcacaccgcatatatggtgcactctcagtacaatctgctctgatgccgcatagttaagccagtatacactccgctatcgctacgtgactgggtcatggctgcgccccgacacccgccaacacccgctgacgcgccctgacgggcttgtctgctcccggcatccgcttacagacaagctgtgaccgtctccgggagctgcatgtgtcagaggttttcaccgtcatcaccgaaacgcgcgaggcagctgcggtaaagctcatcagcgtggtcgtgaagcgattcacagatgtctgcctgttcatccgcgtccagctcgttgagtttctccagaagcgttaatgtctggcttctgataaagcgggccatgttaagggcggttttttcctgtttggtcactgatgcctccgtgtaagggggatttctgttcatgggggtaatgataccgatgaaacgagagaggatgctcacgatacgggttactgatgatgaacatgcccggttactggaacgttgtgagggtaaacaactggcggtatggatgcggcgggaccagagaaaaatcactcagggtcaatgccagcgcttcgttaatacagatgtaggtgttccacagggtagccagcagcatcctgcgatgcagatccggaacataatggtgcagggcgctgacttccgcgtttccagactttacgaaacacggaaaccgaagaccattcatgttgttgctcaggtcgcagacgttttgcagcagcagtcgcttcacgttcgctcgcgtatcggtgattcattctgctaaccagtaaggcaaccccgccagcctagccgggtcctcaacgacaggagcacgatcatgcgcacccgtggggccgccatgccggcgataatggcctgcttctcgccgaaacgtttggtggcgggaccagtgacgaaggcttgagcgagggcgtgcaagattccgaataccgcaagcgacaggccgatcatcgtcgcgctccagcgaaagcggtcctcgccgaaaatgacccagagcgctgccggcacctgtcctacgagttgcatgataaagaagacagtcataagtgcggcgacgatagtcatgccccgcgcccaccggaaggagctgactgggttgaaggctctcaagggcatcggtcgagatcccggtgcctaatgagtgagctaacttacattaattgcgttgcgctcactgcccgctttccagtcgggaaacctgtcgtgccagctgcattaatgaatcggccaacgcgcggggagaggcggtttgcgtattgggcgccagggtggtttttcttttcaccagtgagacgggcaacagctgattgcccttcaccgcctggccctgagagagttgcagcaagcggtccacgctggtttgccccagcaggcgaaaatcctgtttgatggtggttaacggcgggatataacatgagctgtcttcggtatcgtcgtatcccactaccgagatatccgcaccaacgcgcagcccggactcggtaatggcgcgcattgcgcccagcgccatctgatcgttggcaaccagcatcgcagtgggaacgatgccctcattcagcatttgcatggtttgttgaaaaccggacatggcactccagtcgccttcccgttccgctatcggctgaatttgattgcgagtgagatatttatgccagccagccagacgcagacgcgccgagacagaacttaatgggcccgctaacagcgcgatttgctggtgacccaatgcgaccagatgctccacgcccagtcgcgtaccgtcttcatgggagaaaataatactgttgatgggtgtctggtcagagacatcaagaaataacgccggaacattagtgcaggcagcttccacagcaatggcatcctggtcatccagcggatagttaatgatcagcccactgacgcgttgcgcgagaagattgtgcaccgccgctttacaggcttcgacgccgcttcgttctaccatcgacaccaccacgctggcacccagttgatcggcgcgagatttaatcgccgcgacaatttgcgacggcgcgtgcagggccagactggaggtggcaacgccaatcagcaacgactgtttgcccgccagttgttgtgccacgcggttgggaatgtaattcagctccgccatcgccgcttccactttttcccgcgttttcgcagaaacgtggctggcctggttcaccacgcgggaaacggtctgataagagacaccggcatactctgcgacatcgtataacgttactggtttcacattcaccaccctgaattgactctcttccgggcgctatcatgccataccgcgaaaggttttgcgccattcgatggtgtccgggatctcgacgctctcccttatgcgactcctgcattaggaagcagcccagtagtaggttgaggccgttgagcaccgccgccgcaaggaatggtgcatgcaaggagatggcgcccaacagtcccccggccacggggcctgccaccatacccacgccgaaacaagcgctcatgagcccgaagtggcgagcccgatcttccccatcggtgatgtcggcgatataggcgccagcaaccgcacctgtggcgccggtgatgccggccacgatgcgtccggcgtagaggatcgagatctcgatcccgcgaaattaatacgactcactataggggaattgtgagcggataacaattcccctctagaaataattttgtttaactttaagaaggagatataccatgggcagcagccatcatcatcatcatcacagcagcggcctggtgccgcgcggcagccatatggctagtatggatctggatgcagtaaggattaaagtggacacagtaaatgcaaaaccgggagacacagtaaatatacctgtaagattcagtggtataccatccaagggaatagcaaactgtgactttgtatacagctatgacccgaatgtacttgagataatagagataaaaccgggagaattgatagttgacccgaatcctaccaagagctttgatactgcagtatatcctgacagaaagatgatagtattcctgtttgcggaagacagcggaacaggagcgtatgcaataactaaagacggagtatttgctacgatagtagcgaaagtaaaagaaggagcacctaacgggctcagtgtaatcaaatttgtagaagtaggcggatttgcgaacaatgaccttgtagaacagaagacacagttctttgacggtggagtaaatgttggagatacaacagaacctgcaacacctacaacacctgtaacaacaccgacaacaacagatgatctagatgcagctagcatgagcgacccggtcagctatacccgcaaggattccatcgccgtcatcagtatggacgacggcaaggtcaacgcactgggcccggcgatgcaacaagccctcaatgcagcgatcgacaacgcggaccgtgatgatgttggggcgctggtgatcaccggtaatggccgggtattcagcggaggcttcgacctgaagatcctcacctccggtgaagtgcagcccgcgatcgacatgctcaggggcggcttcgagctggcgtatcgcctcttgtcctaccccaaaccggtggtgatggcgtgcaccggtcacgccatcgccatgggcgcgtttctgttgtcctgcggcgatcatcgggtggcggcccacgcatacaacatccaggccaatgaggtcgcgatcggcatgaccattccgtacgcggcgttagagatcatgaagctgcgactgacccggtcggcataccagcaggcaaccgggctggccaagacgttcttcggggaaaccgcgctggccgccgggtttatcgacgagatcgccctgccggaggtggtggtcagccgcgccgaggaagccgcacgagagttcgccggtctcaaccaacacgcccatgccgcgaccaagttgcgctcccgcgccgacgcgctcactgcgattcgggccgggatcgacgggatagcagccgagttcgggctggaattctaagcggccgcactcgagcaccaccaccaccaccactgagatccggctgctaacaaagcccgaaaggaagctgagttggctgctgccaccgctgagcaataactagcataaccccttggggcctctaaacgggtcttgaggggttttttgctgaaaggaggaactatatccggat

SEQ ID NO: 209 - protein, 428 aa, Artificial Sequence
  Description of Artificial Sequence: Synthetic polypeptide
MGSSHHHHHHSSGLVPRGSHMASMDLDAVRIKVDTVNAKPGDTVNIPVRFSGIPSKGIANCDFVYSYDPNVLEIIEIKPGELIVDPNPTKSFDTAVYPDRKMIVFLFAEDSGTGAYAITKDGVFATIVAKVKEGAPNGLSVIKFVEVGGFANNDLVEQKTQFFDGGVNVGDTTEPATPTTPVTTPTTTDDLDAASMSDPVSYTRKDSIAVISMDDGKVNALGPAMQQALNAAIDNADRDDVGALVITGNGRVFSGGFDLKILTSGEVQPAIDMLRGGFELAYRLLSYPKPVVMACTGHAIAMGAFLLSCGDHRVAAHAYNIQANEVAIGMTIPYAALEIMKLRLTRSAYQQATGLAKTFFGETALAAGFIDEIALPEVVVSRAEEAAREFAGLNQHAHAATKLRSRADALTAIRAGIDGIAAEFGLEF

SEQ ID NO: 210 - DNA, 6868 bp, Artificial Sequence
  Description of Artificial Sequence: Synthetic polynucleotide
tggcgaatgggacgcgccctgtagcggcgcattaagcgcggcgggtgtggtggttacgcgcagcgtgaccgctacacttgccagcgccctagcgcccgctcctttcgctttcttcccttcctttctcgccacgttcgccggctttccccgtcaagctctaaatcgggggctccctttagggttccgatttagtgctttacggcacctcgaccccaaaaaacttgattagggtgatggttcacgtagtgggccatcgccctgatagacggtttttcgccctttgacgttggagtccacgttctttaatagtggactcttgttccaaactggaacaacactcaaccctatctcggtctattcttttgatttataagggattttgccgatttcggcctattggttaaaaaatgagctgatttaacaaaaatttaacgcgaattttaacaaaatattaacgtttacaatttcaggtggcacttttcggggaaatgtgcgcggaacccctatttgtttatttttctaaatacattcaaatatgtatccgctcatgaattaattcttagaaaaactcatcgagcatcaaatgaaactgcaatttattcatatcaggattatcaataccatatttttgaaaaagccgtttctgtaatgaaggagaaaactcaccgaggcagttccataggatggcaagatcctggtatcggtctgcgattccgactcgtccaacatcaatacaacctattaatttcccctcgtcaaaaataaggttatcaagtgagaaatcaccatgagtgacgactgaatccggtgagaatggcaaaagtttatgcatttctttccagacttgttcaacaggccagccattacgctcgtcatcaaaatcactcgcatcaaccaaaccgttattcattcgtgattgcgcctgagcgagacgaaatacgcgatcgctgttaaaaggacaattacaaacaggaatcgaatgcaaccggcgcaggaacactgccagcgcatcaacaatattttcacctgaatcaggatattcttctaatacctggaatgctgttttcccggggatcgcagtggtgagtaaccatgcatcatcaggagtacggataaaatgcttgatggtcggaagaggcataaattccgtcagccagtttagtctgaccatctcatctgtaacatcattggcaacgctacctttgccatgtttcagaaacaactctggcgcatcgggcttcccatacaatcgatagattgtcgcacctgattgcccgacattatcgcgagcccatttatacccatataaatcagcatccatgttggaatttaatcgcggcctagagcaagacgtttcccgttgaatatggctcataacaccccttgtattactgtttatgtaagcagacagttttattgttcatgaccaaaatcccttaacgtgagttttcgttccactgagcgtcagaccccgtagaaaagatcaaaggatcttcttgagatcctttttttctgcgcgtaatctgctgcttgcaaacaaaaaaaccaccgctaccagcggtggtttgtttgccggatcaagagctaccaactctttttccgaaggtaactggcttcagcagagcgcagataccaaatactgtccttctagtgtagccgtagttaggccaccacttcaagaactctgtagcaccgcctacatacctcgctctgctaatcctgttaccagtggctgctgccagtggcgataagtcgtgtcttaccgggttggactcaagacgatagttaccggataaggcgcagcggtcgggctgaacggggggttcgtgcacacagcccagcttggagcgaacgacctacaccgaactgagatacctacagcgtgagctatgagaaagcgccacgcttcccgaagggagaaaggcggacaggtatccggtaagcggcagggtcggaacaggagagcgcacgagggagcttccagggggaaacgcctggtatctttatagtcctgtcgggtttcgccacctctgacttgagcgtcgatttttgtgatgctcgtcaggggggcggagcctatggaaaaacgccagcaacgcggcctttttacggttcctggccttttgctggccttttgctcacatgttctttcctgcgttatcccctgattctgtggataaccgtattaccgcctttgagtgagctgataccgctcgccgcagccgaacgaccgagcgcagcgagtcagtgagcgaggaagcggaagagcgcctgatgcggtattttctccttacgcatctgtgcggtatttcacaccgcatatatggtgcactctcagtacaatctgctctgatgccgcatagttaagccagtatacactccgctatcgctacgtgactgggtcatggctgcgccccgacacccgccaacacccgctgacgcgccctgacgggcttgtctgctcccggcatccgcttacagacaagctgtgaccgtctccgggagctgcatgtgtcagaggttttcaccgtcatcaccgaaacgcgcgaggcagctgcggtaaagctcatcagcgtggtcgtgaagcgattcacagatgtctgcctgttcatccgcgtccagctcgttgagtttctccagaagcgttaatgtctggcttctgataaagcgggccatgttaagggcggttttttcctgtttggtcactgatgcctccgtgtaagggggatttctgttcatgggggtaatgataccgatgaaacgagagaggatgctcacgatacgggttactgatgatgaacatgcccggttactggaacgttgtgagggtaaacaactggcggtatggatgcggcgggaccagagaaaaatcactcagggtcaatgccagcgcttcgttaatacagatgtaggtgttccacagggtagccagcagcatcctgcgatgcagatccggaacataatggtgcagggcgctgacttccgcgtttccagactttacgaaacacggaaaccgaagaccattcatgttgttgctcaggtcgcagacgttttgcagcagcagtcgcttcacgttcgctcgcgtatcggtgattcattctgctaaccagtaaggcaaccccgccagcctagccgggtcctcaacgacaggagcacgatcatgcgcacccgtggggccgccatgccggcgataatggcctgcttctcgccgaaacgtttggtggcgggaccagtgacgaaggcttgagcgagggcgtgcaagattccgaataccgcaagcgacaggccgatcatcgtcgcgctccagcgaaagcggtcctcgccgaaaatgacccagagcgctgccggcacctgtcctacgagttgcatgataaagaagacagtcataagtgcggcgacgatagtcatgccccgcgcccaccggaaggagctgactgggttgaaggctctcaagggcatcggtcgagatcccggtgcctaatgagtgagctaacttacattaattgcgttgcgctcactgcccgctttccagtcgggaaacctgtcgtgccagctgcattaatgaatcggccaacgcgcggggagaggcggtttgcgtattgggcgccagggtggtttttcttttcaccagtgagacgggcaacagctgattgcccttcaccgcctggccctgagagagttgcagcaagcggtccacgctggtttgccccagcaggcgaaaatcctgtttgatggtggttaacggcgggatataacatgagctgtcttcggtatcgtcgtatcccactaccgagatatccgcaccaacgcgcagcccggactcggtaatggcgcgcattgcgcccagcgccatctgatcgttggcaaccagcatcgcagtgggaacgatgccctcattcagcatttgcatggtttgttgaaaaccggacatggcactccagtcgccttcccgttccgctatcggctgaatttgattgcgagtgagatatttatgccagccagccagacgcagacgcgccgagacagaacttaatgggcccgctaacagcgcgatttgctggtgacccaatgcgaccagatgctccacgcccagtcgcgtaccgtcttcatgggagaaaataatactgttgatgggtgtctggtcagagacatcaagaaataacgccggaacattagtgcaggcagcttccacagcaatggcatcctggtcatccagcggatagttaatgatcagcccactgacgcgttgcgcgagaagattgtgcaccgccgctttacaggcttcgacgccgcttcgttctaccatcgacaccaccacgctggcacccagttgatcggcgcgagatttaatcgccgcgacaatttgcgacggcgcgtgcagggccagactggaggtggcaacgccaatcagcaacgactgtttgcccgccagttgttgtgccacgcggttgggaatgtaattcagctccgccatcgccgcttccactttttcccgcgttttcgcagaaacgtggctggcctggttcaccacgcgggaaacggtctgataagagacaccggcatactctgcgacatcgtataacgttactggtttcacattcaccaccctgaattgactctcttccgggcgctatcatgccataccgcgaaaggttttgcgccattcgatggtgtccgggatctcgacgctctcccttatgcgactcctgcattaggaagcagcccagtagtaggttgaggccgttgagcaccgccgccgcaaggaatggtgcatgcaaggagatggcgcccaacagtcccccggccacggggcctgccaccatacccacgccgaaacaagcgctcatgagcccgaagtggcgagcccgatcttccccatcggtgatgtcggcgatataggcgccagcaaccgcacctgtggcgccggtgatgccggccacgatgcgtccggcgtagaggatcgagatctcgatcccgcgaaattaatacgactcactataggggaattgtgagcggataacaattcccctctagaaataattttgtttaactttaagaaggagatataccatgggcagcagccatcatcatcatcatcacagcagcggcctggtgccgcgcggcagccatatggctagtatggatctggatgcagtaaggattaaagtggacacagtaaatgcaaaaccgggagacacagtaaatatacctgtaagattcagtggtataccatccaagggaatagcaaactgtgactttgtatacagctatgacccgaatgtacttgagataatagagataaaaccgggagaattgatagttgacccgaatcctaccaagagctttgatactgcagtatatcctgacagaaagatgatagtattcctgtttgcggaagacagcggaacaggagcgtatgcaataactaaagacggagtatttgctacgatagtagcgaaagtaaaagaaggagcacctaacgggctcagtgtaatcaaatttgtagaagtaggcggatttgcgaacaatgaccttgtagaacagaagacacagttctttgacggtggagtaaatgttggagatacaacagaacctgcaacacctacaacacctgtaacaacaccgacaacaacagatgatctagatgcagctagctgcagctgtatgacgttcttcgaacaggtgcgaaggttgcggagcgcagcgacaaccctgccgcgccggctggctatcgcggctatgggggctgtcctggtttacggtctggtcggtaccttcggcgggccggccaccgcgggcgcattctctaggcccggtcttccagtggaatatctgcaggtgccatccgcgtcgatgggccgcgacatcaaggtccagttccagggcggcggaccgcacgcggtctacctgctcgacggtctgcgggcccaggatgactacaacggctgggacatcaacaccccggccttcgaggagtactaccagtcagggttgtcggtgatcatgcccgtgggcggccaatccagtttctacaccgactggtatcagccctcgcagagcaacggccagaactacacctacaagtgggagaccttccttaccagagagatgcccgcctggctacaggccaacaagggcgtgtccccgacaggcaacgcggcggtgggtctttcgatgtcgggcggttccgcgctgatcctggccgcgtactacccgcagcagttcccgtacgccgcgtcgttgtcgggcttcctcaacccgtccgagggctggtggccgacgctgatcggcctggcgatgaacgactcgggcggttacaacgccaacagcatgtggggtccgtccagcgacccggcctggaagcgcaacgacccaatggttcagattccccgcctggtcgccaacaacacccggatctgggtgtactgcggtaacggcacacccagcgacctcggcggcgacaacataccggcgaagttcctggaaggcctcaccctgcgcaccaaccagaccttccgggacacctacgcggccgacggtggacgcaacggggtgtttaacttcccgcccaacggaacacactcgtggccctactggaacgagcagctggtcgccatgaaggccgatatccagcatgtgctcaacggcgcgacacccccggccgcccctgctgcgccggccgcctgcagctgttgagcggccgcactcgagcaccaccaccaccaccactgagatccggctgctaacaaagcccgaaaggaagctgagttggctgctgccaccgctgagcaataactagcataaccccttggggcctctaaacgggtcttgaggggttttttgctgaaaggaggaactatatccggat

SEQ ID NO: 211 - protein, 541 aa, Artificial Sequence
  Description of Artificial Sequence: Synthetic polypeptide
MGSSHHHHHHSSGLVPRGSHMASMDLDAVRIKVDTVNAKPGDTVNIPVRFSGIPSKGIANCDFVYSYDPNVLEIIEIKPGELIVDPNPTKSFDTAVYPDRKMIVFLFAEDSGTGAYAITKDGVFATIVAKVKEGAPNGLSVIKFVEVGGFANNDLVEQKTQFFDGGVNVGDTTEPATPTTPVTTPTTTDDLDAASCSCMTFFEQVRRLRSAATTLPRRLAIAAMGAVLVYGLVGTFGGPATAGAFSRPGLPVEYLQVPSASMGRDIKVQFQGGGPHAVYLLDGLRAQDDYNGWDINTPAFEEYYQSGLSVIMPVGGQSSFYTDWYQPSQSNGQNYTYKWETFLTREMPAWLQANKGVSPTGNAAVGLSMSGGSALILAAYYPQQFPYAASLSGFLNPSEGWWPTLIGLAMNDSGGYNANSMWGPSSDPAWKRNDPMVQIPRLVANNTRIWVYCGNGTPSDLGGDNIPAKFLEGLTLRTNQTFRDTYAADGGRNGVFNFPPNGTHSWPYWNEQLVAMKADIQHVLNGATPPAAPAAPAACSC

SEQ ID NO: 212 - DNA, 6196 bp, Artificial Sequence
  Description of Artificial Sequence: Synthetic polynucleotide
tggcgaatgggacgcgccctgtagcggcgcattaagcgcggcgggtgtggtggttacgcgcagcgtgaccgctacacttgccagcgccctagcgcccgctcctttcgctttcttcccttcctttctcgccacgttcgccggctttccccgtcaagctctaaatcgggggctccctttagggttccgatttagtgctttacggcacctcgaccccaaaaaacttgattagggtgatggttcacgtagtgggccatcgccctgatagacggtttttcgccctttgacgttggagtccacgttctttaatagtggactcttgttccaaactggaacaacactcaaccctatctcggtctattcttttgatttataagggattttgccgatttcggcctattggttaaaaaatgagctgatttaacaaaaatttaacgcgaattttaacaaaatattaacgtttacaatttcaggtggcacttttcggggaaatgtgcgcggaacccctatttgtttatttttctaaatacattcaaatatgtatccgctcatgaattaattcttagaaaaactcatcgagcatcaaatgaaactgcaatttattcatatcaggattatcaataccatatttttgaaaaagccgtttctgtaatgaaggagaaaactcaccgaggcagttccataggatggcaagatcctggtatcggtctgcgattccgactcgtccaacatcaatacaacctattaatttcccctcgtcaaaaataaggttatcaagtgagaaatcaccatgagtgacgactgaatccggtgagaatggcaaaagtttatgcatttctttccagacttgttcaacaggccagccattacgctcgtcatcaaaatcactcgcatcaaccaaaccgttattcattcgtgattgcgcctgagcgagacgaaatacgcgatcgctgttaaaaggacaattacaaacaggaatcgaatgcaaccggcgcaggaacactgccagcgcatcaacaatattttcacctgaatcaggatattcttctaatacctggaatgctgttttcccggggatcgcagtggtgagtaaccatgcatcatcaggagtacggataaaatgcttgatggtcggaagaggcataaattccgtcagccagtttagtctgaccatctcatctgtaacatcattggcaacgctacctttgccatgtttcagaaacaactctggcgcatcgggcttcccatacaatcgatagattgtcgcacctgattgcccgacattatcgcgagcccatttatacccatataaatcagcatccatgttggaatttaatcgcggcctagagcaagacgtttcccgttgaatatggctcataacaccccttgtattactgtttatgtaagcagacagttttattgttcatgaccaaaatcccttaacgtgagttttcgttccactgagcgtcagaccccgtagaaaagatcaaaggatcttcttgagatcctttttttctgcgcgtaatctgctgcttgcaaacaaaaaaaccaccgctaccagcggtggtttgtttgccggatcaagagctaccaactctttttccgaaggtaactggcttcagcagagcgcagataccaaatactgtccttctagtgtagccgtagttaggccaccacttcaagaactctgtagcaccgcctacatacctcgctctgctaatcctgttaccagtggctgctgccagtggcgataagtcgtgtcttaccgggttggactcaagacgatagttaccggataaggcgcagcggtcgggctgaacggggggttcgtgcacacagcccagcttggagcgaacgacctacaccgaactgagatacctacagcgtgagctatgagaaagcgccacgcttcccgaagggagaaaggcggacaggtatccggtaagcggcagggtcggaacaggagagcgcacgagggagcttccagggggaaacgcctggtatctttatagtcctgtcgggtttcgccacctctgacttgagcgtcgatttttgtgatgctcgtcaggggggcggagcctatggaaaaacgccagcaacgcggcctttttacggttcctggccttttgctggccttttgctcacatgttctttcctgcgttatcccctgattctgtggataaccgtattaccgcctttgagtgagctgataccgctcgccgcagccgaacgaccgagcgcagcgagtcagtgagcgaggaagcggaagagcgcctgatgcggtattttctccttacgcatctgtgcggtatttcacaccgcatatatggtgcactctcagtacaatctgctctgatgccgcatagttaagccagtatacactccgctatcgctacgtgactgggtcatggctgcgccccgacacccgccaacacccgctgacgcgccctgacgggcttgtctgctcccggcatccgcttacagacaagctgtgaccgtctccgggagctgcatgtgtcagaggttttcaccgtcatcaccgaaacgcgcgaggcagctgcggtaaagctcatcagcgtggtcgtgaagcgattcacagatgtctgcctgttcatccgcgtccagctcgttgagtttctccagaagcgttaatgtctggcttctgataaagcgggccatgttaagggcggttttttcctgtttggtcactgatgcctccgtgtaagggggatttctgttcatgggggtaatgataccgatgaaacgagagaggatgctcacgatacgggttactgatgatgaacatgcccggttactggaacgttgtgagggtaaacaactggcggtatggatgcggcgggaccagagaaaaatcactcagggtcaatgccagcgcttcgttaatacagatgtaggtgttccacagggtagccagcagcatcctgcgatgcagatccggaacataatggtgcagggcgctgacttccgcgtttccagactttacgaaacacggaaaccgaagaccattcatgttgttgctcaggtcgcagacgttttgcagcagcagtcgcttcacgttcgctcgcgtatcggtgattcattctgctaaccagtaaggcaaccccgccagcctagccgggtcctcaacgacaggagcacgatcatgcgcacccgtggggccgccatgccggcgataatggcctgcttctcgccgaaacgtttggtggcgggaccagtgacgaaggcttgagcgagggcgtgcaagattccgaataccgcaagcgacaggccgatcatcgtcgcgctccagcgaaagcggtcctcgccgaaaatgacccagagcgctgccggcacctgtcctacgagttgcatgataaagaagacagtcataagtgcggcgacgatagtcatgccccgcgcccaccggaaggagctgactgggttgaaggctctcaagggcatcggtcgagatcccggtgcctaatgagtgagctaacttacattaattgcgttgcgctcactgcccgctttccagtcgggaaacctgtcgtgccagctgcattaatgaatcggccaacgcgcggggagaggcggtttgcgtattgggcgccagggtggtttttcttttcaccagtgagacgggcaacagctgattgcccttcaccgcctggccctgagagagttgcagcaagcggtccacgctggtttgccccagcaggcgaaaatcctgtttgatggtggttaacggcgggatataacatgagctgtcttcggtatcgtcgtatcccactaccgagatatccgcaccaacgcgcagcccggactcggtaatggcgcgcattgcgcccagcgccatctgatcgttggcaaccagcatcgcagtgggaacgatgccctcattcagcatttgcatggtttgttgaaaaccggacatggcactccagtcgccttcccgttccgctatcggctgaatttgattgcgagtgagatatttatgccagccagccagacgcagacgcgccgagacagaacttaatgggcccgctaacagcgcgatttgctggtgacccaatgcgaccagatgctccacgcccagtcgcgtaccgtcttcatgggagaaaataatactgttgatgggtgtctggtcagagacatcaagaaataacgccggaacattagtgcaggcagcttccacagcaatggcatcctggtcatccagcggatagttaatgatcagcccactgacgcgttgcgcgagaagattgtgcaccgccgctttacaggcttcgacgccgcttcgttctaccatcgacaccaccacgctggcacccagttgatcggcgcgagatttaatcgccgcgacaatttgcgacggcgcgtgcagggccagactggaggtggcaacgccaatcagcaacgactgtttgcccgccagttgttgtgccacgcggttgggaatgtaattcagctccgccatcgccgcttccactttttcccgcgttttcgcagaaacgtggctggcctggttcaccacgcgggaaacggtctgataagagacaccggcatactctgcgacatcgtataacgttactggtttcacattcaccaccctgaattgactctcttccgggcgctatcatgccataccgcgaaaggttttgcgccattcgatggtgtccgggatctcgacgctctcccttatgcgactcctgcattaggaagcagcccagtagtaggttgaggccgttgagcaccgccgccgcaaggaatggtgcatgcaaggagatggcgcccaacagtcccccggccacggggcctgccaccatacccacgccgaaacaagcgctcatgagcccgaagtggcgagcccgatcttccccatcggtgatgtcggcgatataggcgccagcaaccgcacctgtggcgccggtgatgccggccacgatgcgtccggcgtagaggatcgagatctcgatcccgcgaaattaatacgactcactataggggaattgtgagcggataacaattcccctctagaaataattttgtttaactttaagaaggagatataccatgggcagcagccatcatcatcatcatcacagcagcggcctggtgccgcgcggcagccatatggctagtatggatctggatgcagtaaggattaaagtggacacagtaaatgcaaaaccgggagacacagtaaatatacctgtaagattcagtggtataccatccaagggaatagcaaactgtgactttgtatacagctatgacccgaatgtacttgagataatagagataaaaccgggagaattgatagttgacccgaatcctaccaagagctttgatactgcagtatatcctgacagaaagatgatagtattcctgtttgcggaagacagcggaacaggagcgtatgcaataactaaagacggagtatttgctacgatagtagcgaaagtaaaagaaggagcacctaacgggctcagtgtaatcaaatttgtagaagtaggcggatttgcgaacaatgaccttgtagaacagaagacacagttctttgacggtggagtaaatgttggagatacaacagaacctgcaacacctacaacacctgtaacaacaccgacaacaacagatgatctagatgcagctagcatggccgatgcggttaagtacgtagttatgtgcaactgcgacgacgaaccgggagcgctcatcatcgcctggatcgacgacgaacgacccgccggcgggcacatacagatgcggtcgaacacccgcttcaccgaaacacagtggggccgccatatcgagtggaaactcgaatgccgggcatgccgaaagtatgcgccgatatccgagatgaccgccgcggcgatcctcgacggtttcggggcgaagcttcacgagctgagaacgtcgaccatccccgacgctgacgatccatcaatagcagaggcgcgacacgtaattccgttcagcgcattatgcttgcgcttgagccagctaggcggggaattctaagcggccgcactcgagcaccaccaccaccaccactgagatccggctgctaacaaagcccgaaaggaagctgagttggctgctgccaccgctgagcaataactagcataaccccttggggcctctaaacgggtcttgaggggttttttgctgaaaggaggaactatatccggat

SEQ ID NO: 213 - protein, 317 aa, Artificial Sequence
  Description of Artificial Sequence: Synthetic polypeptide
MGSSHHHHHHSSGLVPRGSHMASMDLDAVRIKVDTVNAKPGDTVNIPVRFSGIPSKGIANCDFVYSYDPNVLEIIEIKPGELIVDPNPTKSFDTAVYPDRKMIVFLFAEDSGTGAYAITKDGVFATIVAKVKEGAPNGLSVIKFVEVGGFANNDLVEQKTQFFDGGVNVGDTTEPATPTTPVTTPTTTDDLDAASMADAVKYVVMCNCDDEPGALIIAWIDDERPAGGHIQMRSNTRFTETQWGRHIEWKLECRACRKYAPISEMTAAAILDGFGAKLHELRTSTIPDADDPSIAEARHVIPFSALCLRLSQLGGEF

SEQ ID NO: 214 - DNA, 6961 bp, Artificial Sequence
  Description of Artificial Sequence: Synthetic polynucleotide
tggcgaatgggacgcgccctgtagcggcgcattaagcgcggcgggtgtggtggttacgcgcagcgtgaccgctacacttgccagcgccctagcgcccgctcctttcgctttcttcccttcctttctcgccacgttcgccggctttccccgtcaagctctaaatcgggggctccctttagggttccgatttagtgctttacggcacctcgaccccaaaaaacttgattagggtgatggttcacgtagtgggccatcgccctgatagacggtttttcgccctttgacgttggagtccacgttctttaatagtggactcttgttccaaactggaacaacactcaaccctatctcggtctattcttttgatttataagggattttgccgatttcggcctattggttaaaaaatgagctgatttaacaaaaatttaacgcgaattttaacaaaatattaacgtttacaatttcaggtggcacttttcggggaaatgtgcgcggaacccctatttgtttatttttctaaatacattcaaatatgtatccgctcatgaattaattcttagaaaaactcatcgagcatcaaatgaaactgcaatttattcatatcaggattatcaataccatatttttgaaaaagccgtttctgtaatgaaggagaaaactcaccgaggcagttccataggatggcaagatcctggtatcggtctgcgattccgactcgtccaacatcaatacaacctattaatttcccctcgtcaaaaataaggttatcaagtgagaaatcaccatgagtgacgactgaatccggtgagaatggcaaaagtttatgcatttctttccagacttgttcaacaggccagccattacgctcgtcatcaaaatcactcgcatcaaccaaaccgttattcattcgtgattgcgcctgagcgagacgaaatacgcgatcgctgttaaaaggacaattacaaacaggaatcgaatgcaaccggcgcaggaacactgccagcgcatcaacaatattttcacctgaatcaggatattcttctaatacctggaatgctgttttcccggggatcgcagtggtgagtaaccatgcatcatcaggagtacggataaaatgcttgatggtcggaagaggcataaattccgtcagccagtttagtctgaccatctcatctgtaacatcattggcaacgctacctttgccatgtttcagaaacaactctggcgcatcgggcttcccatacaatcgatagattgtcgcacctgattgcccgacattatcgcgagcccatttatacccatataaatcagcatccatgttggaatttaatcgcggcctagagcaagacgtttcccgttgaatatggctcataacaccccttgtattactgtttatgtaagcagacagttttattgttcatgaccaaaatcccttaacgtgagttttcgttccactgagcgtcagaccccgtagaaaagatcaaaggatcttcttgagatcctttttttctgcgcgtaatctgctgcttgcaaacaaaaaaaccaccgctaccagcggtggtttgtttgccggatcaagagctaccaactctttttccgaaggtaactggcttcagcagagcgcagataccaaatactgtccttctagtgtagccgtagttaggccaccacttcaagaactctgtagcaccgcctacatacctcgctctgctaatcctgttaccagtggctgctgccagtggcgataagtcgtgtcttaccgggttggactcaagacgatagttaccggataaggcgcagcggtcgggctgaacggggggttcgtgcacacagcccagcttggagcgaacgacctacaccgaactgagatacctacagcgtgagctatgagaaagcgccacgcttcccgaagggagaaaggcggacaggtatccggtaagcggcagggtcggaacaggagagcgcacgagggagcttccagggggaaacgcctggtatctttatagtcctgtcgggtttcgccacctctgacttgagcgtcgatttttgtgatgctcgtcaggggggcggagcctatggaaaaacgccagcaacgcggcctttttacggttcctggccttttgctggccttttgctcacatgttctttcctgcgttatcccctgattctgtggataaccgtattaccgcctttgagtgagctgataccgctcgccgcagccgaacgaccgagcgcagcgagtcagtgagcgaggaagcggaagagcgcctgatgcggtattttctccttacgcatctgtgcggtatttcacaccgcatatatggtgcactctcagtacaatctgctctgatgccgcatagttaagccagtatacactccgctatcgctacgtgactgggtcatggctgcgccccgacacccgccaacacccgctgacgcgccctgacgggcttgtctgctcccggcatccgcttacagacaagctgtgaccgtctccgggagctgcatgtgtcagaggttttcaccgtcatcaccgaaacgcgcgaggcagctgcggtaaagctcatcagcgtggtcgtgaagcgattcacagatgtctgcctgttcatccgcgtccagctcgttgagtttctccagaagcgttaatgtctggcttctgataaagcgggccatgttaagggcggttttttcctgtttggtcactgatgcctccgtgtaagggggatttctgttcatgggggtaatgataccgatgaaacgagagaggatgctcacgatacgggttactgatgatgaacatgcccggttactggaacgttgtgagggtaaacaactggcggtatggatgcggcgggaccagagaaaaatcactcagggtcaatgccagcgcttcgttaatacagatgtaggtgttccacagggtagccagcagcatcctgcgatgcagatccggaacataatggtgcagggcgctgacttccgcgtttccagactttacgaaacacggaaaccgaagaccattcatgttgttgctcaggtcgcagacgttttgcagcagcagtcgcttcacgttcgctcgcgtatcggtgattcattctgctaaccagtaaggcaaccccgccagcctagccgggtcctcaacgacaggagcacgatcatgcgcacccgtggggccgccatgccggcgataatggcctgcttctcgccgaaacgtttggtggcgggaccagtgacgaaggcttgagcgagggcgtgcaagattccgaataccgcaagcgacaggccgatcatcgtcgcgctccagcgaaagcggtcctcgccgaaaatgacccagagcgctgccggcacctgtcctacgagttgcatgataaagaagacagtcataagtgcggcgacgatagtcatgccccgcgcccaccggaaggagctgactgggttgaaggctctcaagggcatcggtcgagatcccggtgcctaatgagtgagctaacttacattaattgcgttgcgctcactgcccgctttccagtcgggaaacctgtcgtgccagctgcattaatgaatcggccaacgcgcggggagaggcggtttgcgtattgggcgccagggtggtttttcttttcaccagtgagacgggcaacagctgattgcccttcaccgcctggccctgagagagttgcagcaagcggtccacgctggtttgccccagcaggcgaaaatcctgtttgatggtggttaacggcgggatataacatgagctgtcttcggtatcgtcgtatcccactaccgagatatccgcaccaacgcgcagcccggactcggtaatggcgcgcattgcgcccagcgccatctgatcgttggcaaccagcatcgcagtgggaacgatgccctcattcagcatttgcatggtttgttgaaaaccggacatggcactccagtcgccttcccgttccgctatcggctgaatttgattgcgagtgagatatttatgccagccagccagacgcagacgcgccgagacagaacttaatgggcccgctaacagcgcgatttgctggtgacccaatgcgaccagatgctccacgcccagtcgcgtaccgtcttcatgggagaaaataatactgttgatgggtgtctggtcagagacatcaagaaataacgccggaacattagtgcaggcagcttccacagcaatggcatcctggtcatccagcggatagttaatgatcagcccactgacgcgttgcgcgagaagattgtgcaccgccgctttacaggcttcgacgccgcttcgttctaccatcgacaccaccacgctggcacccagttgatcggcgcgagatttaatcgccgcgacaatttgcgacggcgcgtgcagggccagactggaggtggcaacgccaatcagcaacgactgtttgcccgccagttgttgtgccacgcggttgggaatgtaattcagctccgccatcgccgcttccactttttcccgcgttttcgcagaaacgtggctggcctggttcaccacgcgggaaacggtctgataagagacaccggcatactctgcgacatcgtataacgttactggtttcacattcaccaccctgaattgactctcttccgggcgctatcatgccataccgcgaaaggttttgcgccattcgatggtgtccgggatctcgacgctctcccttatgcgactcctgcattaggaagcagcccagtagtaggttgaggccgttgagcaccgccgccgcaaggaatggtgcatgcaaggagatggcgcccaacagtcccccggccacggggcctgccaccatacccacgccgaaacaagcgctcatgagcccgaagtggcgagcccgatcttccccatcggtgatgtcggcgatataggcgccagcaaccgcacctgtggcgccggtgatgccggccacgatgcgtccggcgtagaggatcgagatctcgatcccgcgaaattaatacgactcactataggggaattgtgagcggataacaattcccctctagaaataattttgtttaactttaagaaggagatataccatgggcagcagccatcatcatcatcatcacagcagcggcctggtgccgcgcggcagccatatggctagtatggatctggatgcagtaaggattaaagtggacacagtaaatgcaaaaccgggagacacagtaaatatacctgtaagattcagtggtataccatccaagggaatagcaaactgtgactttgtatacagctatgacccgaatgtacttgagataatagagataaaaccgggagaattgatagttgacccgaatcctaccaagagctttgatactgcagtatatcctgacagaaagatgatagtattcctgtttgcggaagacagcggaacaggagcgtatgcaataactaaagacggagtatttgctacgatagtagcgaaagtaaaagaaggagcacctaacgggctcagtgtaatcaaatttgtagaagtaggcggatttgcgaacaatgaccttgtagaacagaagacacagttctttgacggtggagtaaatgttggagatacaacagaacctgcaacacctacaacacctgtaacaacaccgacaacaacagatgatctagatgcagctagcgtgacgcaaaccggcaagcgtcagagacgcaaattcggtcgcatccgacagttcaactccggccgctggcaagccagctacaccggccccgacggccgcgtgtacatcgcccccaaaaccttcaacgccaagatcgacgccgaagcatggctcaccgaccgccgccgcgaaatcgaccgacaactatggtccccggcatcgggtcaggaagaccgccccggagccccattcggtgagtacgccgaaggatggctgaagcagcgtggaatcaaggaccgcacccgcgcccactatcgcaaactgctggacaaccacatcctggccaccttcgctgacaccgacctacgcgacatcaccccggccgccgtgcgccgctggtacgccaccaccgccgtgggcacaccgaccatgcgggcacactcctacagcttgctgcgcgcaatcatgcagaccgccttggccgacgacctgatcgactccaacccctgccgcatctcaggcgcgtccaccgcccgccgcgtccacaagatcaggcccgccaccctcgacgagctggaaaccatcaccaaagccatgcccgacccctaccaggcgttcgtgctgatggcggcatggctggccatgcgctacggcgagctgaccgaattacgccgcaaagacatcgacctgcacggcgaggttgcgcgggtgcggcgggctgtcgttcgggtgggcgaaggcttcaaggtgacgacaccgaaaagcgatgcgggagtgcgcgacataagtatcccgccacatctgatacccgccatcgaagaccaccttcacaaacacgtcaaccccggccgggagtccctgctgttcccatcggtcaacgaccccaaccgtcacctagcaccctcggcgctgtaccgcatgttctacaaggcccgaaaagccgccggccgaccagacttacgggtgcacgaccttcgacactccggcgccgtgttggctgcatccaccggcgccacactggccgaactgatgcagcggctaggacacagcacagccggcgccgcactccgctaccagcacgccgccaagggccgggaccgcgaaatcgccgcactgttaagcaaactggccgagaaccaggagatggaattctaagcggccgcactcgagcaccaccaccaccaccactgagatccggctgctaacaaagcccgaaaggaagctgagttggctgctgccaccgctgagcaataactagcataaccccttggggcctctaaacgggtcttgaggggttttttgctgaaaggaggaactatatccggat

SEQ ID NO: 215 - protein, 572 aa, Artificial Sequence
  Description of Artificial Sequence: Synthetic polypeptide
MGSSHHHHHHSSGLVPRGSHMASMDLDAVRIKVDTVNAKPGDTVNIPVRFSGIPSKGIANCDFVYSYDPNVLEIIEIKPGELIVDPNPTKSFDTAVYPDRKMIVFLFAEDSGTGAYAITKDGVFATIVAKVKEGAPNGLSVIKFVEVGGFANNDLVEQKTQFFDGGVNVGDTTEPATPTTPVTTPTTTDDLDAASVTQTGKRQRRKFGRIRQFNSGRWQASYTGPDGRVYIAPKTFNAKIDAEAWLTDRRREIDRQLWSPASGQEDRPGAPFGEYAEGWLKQRGIKDRTRAHYRKLLDNHILATFADTDLRDITPAAVRRWYATTAVGTPTMRAHSYSLLRAIMQTALADDLIDSNPCRISGASTARRVHKIRPATLDELETITKAMPDPYQAFVLMAAWLAMRYGELTELRRKDIDLHGEVARVRRAVVRVGEGFKVTTPKSDAGVRDISIPPHLIPAIEDHLHKHVNPGRESLLFPSVNDPNRHLAPSALYRMFYKARKAAGRPDLRVHDLRHSGAVLAASTGATLAELMQRLGHSTAGAALRYQHAAKGRDREIAALLSKLAENQEMEF

SEQ ID NO: 216 - DNA, 6613 bp, Artificial Sequence
  Description of Artificial Sequence: Synthetic polynucleotide
tggcgaatgggacgcgccctgtagcggcgcattaagcgcggcgggtgtggtggttacgcgcagcgtgaccgctacacttgccagcgccctagcgcccgctcctttcgctttcttcccttcctttctcgccacgttcgccggctttccccgtcaagctctaaatcgggggctccctttagggttccgatttagtgctttacggcacctcgaccccaaaaaacttgattagggtgatggttcacgtagtgggccatcgccctgatagacggtttttcgccctttgacgttggagtccacgttctttaatagtggactcttgttccaaactggaacaacactcaaccctatctcggtctattcttttgatttataagggattttgccgatttcggcctattggttaaaaaatgagctgatttaacaaaaatttaacgcgaattttaacaaaatattaacgtttacaatttcaggtggcacttttcggggaaatgtgcgcggaacccctatttgtttatttttctaaatacattcaaatatgtatccgctcatgaattaattcttagaaaaactcatcgagcatcaaatgaaactgcaatttattcatatcaggattatcaataccatatttttgaaaaagccgtttctgtaatgaaggagaaaactcaccgaggcagttccataggatggcaagatcctggtatcggtctgcgattccgactcgtccaacatcaatacaacctattaatttcccctcgtcaaaaataaggttatcaagtgagaaatcaccatgagtgacgactgaatccggtgagaatggcaaaagtttatgcatttctttccagacttgttcaacaggccagccattacgctcgtcatcaaaatcactcgcatcaaccaaaccgttattcattcgtgattgcgcctgagcgagacgaaatacgcgatcgctgttaaaaggacaattacaaacaggaatcgaatgcaaccggcgcaggaacactgccagcgcatcaacaatattttcacctgaatcaggatattcttctaatacctggaatgctgttttcccggggatcgcagtggtgagtaaccatgcatcatcaggagtacggataaaatgcttgatggtcggaagaggcataaattccgtcagccagtttagtctgaccatctcatctgtaacatcattggcaacgctacctttgccatgtttcagaaacaactctggcgcatcgggcttcccatacaatcgatagattgtcgcacctgattgcccgacattatcgcgagcccatttatacccatataaatcagcatccatgttggaatttaatcgcggcctagagcaagacgtttcccgttgaatatggctcataacaccccttgtattactgtttatgtaagcagacagttttattgttcatgaccaaaatcccttaacgtgagttttcgttccactgagcgtcagaccccgtagaaaagatcaaaggatcttcttgagatcctttttttctgcgcgtaatctgctgcttgcaaacaaaaaaaccaccgctaccagcggtggtttgtttgccggatcaagagctaccaactctttttccgaaggtaactggcttcagcagagcgcagataccaaatactgtccttctagtgtagccgtagttaggccaccacttcaagaactctgtagcaccgcctacatacctcgctctgctaatcctgttaccagtggctgctgccagtggcgataagtcgtgtcttaccgggttggactcaagacgatagttaccggataaggcgcagcggtcgggctgaacggggggttcgtgcacacagcccagcttggagcgaacgacctacaccgaactgagatacctacagcgtgagctatgagaaagcgccacgcttcccgaagggagaaaggcggacaggtatccggtaagcggcagggtcggaacaggagagcgcacgagggagcttccagggggaaacgcctggtatctttatagtcctgtcgggtttcgccacctctgacttgagcgtcgatttttgtgatgctcgtcaggggggcggagcctatggaaaaacgccagcaacgcggcctttttacggttcctggccttttgctggccttttgctcacatgttctttcctgcgttatcccctgattctgtggataaccgtattaccgcctttgagtgagctgataccgctcgccgcagccgaacgaccgagcgcagcgagtcagtgagcgaggaagcggaagagcgcctgatgcggtattttctccttacgcatctgtgcggtatttcacaccgcatatatggtgcactctcagtacaatctgctctgatgccgcatagttaagccagtatacactccgctatcgctacgtgactgggtcatggctgcgccccgacacccgccaacacccgctgacgcgccctgacgggcttgtctgctcccggcatccgcttacagacaagctgtgaccgtctccgggagctgcatgtgtcagaggttttcaccgtcatcaccgaaacgcgcgaggcagctgcggtaaagctcatcagcgtggtcgtgaagcgattcacagatgtctgcctgttcatccgcgtccagctcgttgagtttctccagaagcgttaatgtctggcttctgataaagcgggccatgttaagggcggttttttcctgtttggtcactgatgcctccgtgtaagggggatttctgttcatgggggtaatgataccgatgaaacgagagaggatgctcacgatacgggttactgatgatgaacatgcccggttactggaacgttgtgagggtaaacaactggcggtatggatgcggcgggaccagagaaaaatcactcagggtcaatgccagcgcttcgttaatacagatgtaggtgttccacagggtagccagcagcatcctgcgatgcagatccggaacataatggtgcagggcgctgacttccgcgtttccagactttacgaaacacggaaaccgaagaccattcatgttgttgctcaggtcgcagacgttttgcagcagcagtcgcttcacgttcgctcgcgtatcggtgattcattctgctaaccagtaaggcaaccccgccagcctagccgggtcctcaacgacaggagcacgatcatgcgcacccgtggggccgccatgccggcgataatggcctgcttctcgccgaaacgtttggtggcgggaccagtgacgaaggcttgagcgagggcgtgcaagattccgaataccgcaagcgacaggccgatcatcgtcgcgctccagcgaaagcggtcctcgccgaaaatgacccagagcgctgccggcacctgtcctacgagttgcatgataaagaagacagtcataagtgcggcgacgatagtcatgccccgcgcccaccggaaggagctgactgggttgaaggctctcaagggcatcggtcgagatcccggtgcctaatgagtgagctaacttacattaattgcgttgcgctcactgcccgctttccagtcgggaaacctgtcgtgccagctgcattaatgaatcggccaacgcgcggggagaggcggtttgcgtattgggcgccagggtggtttttcttttcaccagtgagacgggcaacagctgattgcccttcaccgcctggccctgagagagttgcagcaagcggtccacgctggtttgccccagcaggcgaaaatcctgtttgatggtggttaacggcgggatataacatgagctgtcttcggtatcgtcgtatcccactaccgagatatccgcaccaacgcgcagcccggactcggtaatggcgcgcattgcgcccagcgccatctgatcgttggcaaccagcatcgcagtgggaacgatgccctcattcagcatttgcatggtttgttgaaaaccggacatggcactccagtcgccttcccgttccgctatcggctgaatttgattgcgagtgagatatttatgccagccagccagacgcagacgcgccgagacagaacttaatgggcccgctaacagcgcgatttgctggtgacccaatgcgaccagatgctccacgcccagtcgcgtaccgtcttcatgggagaaaataatactgttgatgggtgtctggtcagagacatcaagaaataacgccggaacattagtgcaggcagcttccacagcaatggcatcctggtcatccagcggatagttaatgatcagcccactgacgcgttgcgcgagaagattgtgcaccgccgctttacaggcttcgacgccgcttcgttctaccatcgacaccaccacgctggcacccagttgatcggcgcgagatttaatcgccgcgacaatttgcgacggcgcgtgcagggccagactggaggtggcaacgccaatcagcaacgactgtttgcccgccagttgttgtgccacgcggttgggaatgtaattcagctccgccatcgccgcttccactttttcccgcgttttcgcagaaacgtggctggcctggttcaccacgcgggaaacggtctgataagagacaccggcatactctgcgacatcgtataacgttactggtttcacattcaccaccctgaattgactctcttccgggcgctatcatgccataccgcgaaaggttttgcgccattcgatggtgtccgggatctcgacgctctcccttatgcgactcctgcattaggaagcagcccagtagtaggttgaggccgttgagcaccgccgccgcaaggaatggtgcatgcaaggagatggcgcccaacagtcccccggccacggggcctgccaccatacccacgccgaaacaagcgctcatgagcccgaagtggcgagcccgatcttccccatcggtgatgtcggcgatataggcgccagcaaccgcacctgtggcgccggtgatgccggccacgatgcgtccggcgtagaggatcgagatctcgatcccgcgaaattaatacgactcactataggggaattgtgagcggataacaattcccctctagaaataattttgtttaactttaagaaggagatataccatgggcagcagccatcatcatcatcatcacagcagcggcctggtgccgcgcggcagccatatggctagtatggatctggatgcagtaaggattaaagtggacacagtaaatgcaaaaccgggagacacagtaaatatacctgtaagattcagtggtataccatccaagggaatagcaaactgtgactttgtatacagctatgacccgaatgtacttgagataatagagataaaaccgggagaattgatagttgacccgaatcctaccaagagctttgatactgcagtatatcctgacagaaagatgatagtattcctgtttgcggaagacagcggaacaggagcgtatgcaataactaaagacggagtatttgctacgatagtagcgaaagtaaaagaaggagcacctaacgggctcagtgtaatcaaatttgtagaagtaggcggatttgcgaacaatgaccttgtagaacagaagacacagttctttgacggtggagtaaatgttggagatacaacagaacctgcaacacctacaacacctgtaacaacaccgacaacaacagatgatctagatgcagctagtatgcccaagagaagcgaatacaggcaaggcacgccgaactgggtcgaccttcagaccaccgatcagtccgccgccaaaaagttctacacatcgttgttcggctggggttacgacgacaacccggtccccggaggcggtggggtctattccatggccacgctgaacggcgaagccgtggccgccatcgcaccgatgcccccgggtgcaccggaggggatgccgccgatctggaacacctatatcgcggtggacgacgtcgatgcggtggtggacaaggtggtgcccgggggcgggcaggtgatgatgccggccttcgacatcggcgatgccggccggatgtcgttcatcaccgatccgaccggcgctgccgtgggcctatggcaggccaatcggcacatcggagcgacgttggtcaacgagacgggcacgctcatctggaacgaactgctcacggacaagccggatttggcgctagcgttctacgaggctgtggttggcctcacccactcgagcatggagatagctgcgggccagaactatcgggtgctcaaggccggcgacgcggaagtcggcggctgtatggaaccgccgatgcccggcgtgccgaatcattggcacgtctactttgcggtggatgacgccgacgccacggcggccaaagccgccgcagcgggcggccaggtcattgcggaaccggctgacattccgtcggtgggccggttcgccgtgttgtccgatccgcagggcgcgatcttcagtgtgttgaagcccgcaccgcagcaataggcggccgcactcgagcaccaccaccaccaccactgagatccggctgctaacaaagcccgaaaggaagctgagttggctgctgccaccgctgagcaataactagcataaccccttggggcctctaaacgggtcttgaggggttttttgctgaaaggaggaactatatccggat

SEQ ID NO: 217 - protein, 456 aa, Artificial Sequence
  Description of Artificial Sequence: Synthetic polypeptide
MGSSHHHHHHSSGLVPRGSHMASMDLDAVRIKVDTVNAKPGDTVNIPVRFSGIPSKGIANCDFVYSYDPNVLEIIEIKPGELIVDPNPTKSFDTAVYPDRKMIVFLFAEDSGTGAYAITKDGVFATIVAKVKEGAPNGLSVIKFVEVGGFANNDLVEQKTQFFDGGVNVGDTTEPATPTTPVTTPTTTDDLDAASMPKRSEYRQGTPNWVDLQTTDQSAAKKFYTSLFGWGYDDNPVPGGGGVYSMATLNGEAVAAIAPMPPGAPEGMPPIWNTYIAVDDVDAVVDKVVPGGGQVMMPAFDIGDAGRMSFITDPTGAAVGLWQANRHIGATLVNETGTLIWNELLTDKPDLALAFYEAVVGLTHSSMEIAAGQNYRVLKAGDAEVGGCMEPPMPGVPNHWHVYFAVDDADATAAKAAAAGGQVIAEPADIPSVGRFAVLSDPQGAIFSVLKPAPQQ

SEQ ID NO: 218 - DNA, 8002 bp, Artificial Sequence
  Description of Artificial Sequence: Synthetic polynucleotide
tggcgaatgggacgcgccctgtagcggcgcattaagcgcggcgggtgtggtggttacgcgcagcgtgaccgctacacttgccagcgccctagcgcccgctcctttcgctttcttcccttcctttctcgccacgttcgccggctttccccgtcaagctctaaatcgggggctccctttagggttccgatttagtgctttacggcacctcgaccccaaaaaacttgattagggtgatggttcacgtagtgggccatcgccctgatagacggtttttcgccctttgacgttggagtccacgttctttaatagtggactcttgttccaaactggaacaacactcaaccctatctcggtctattcttttgatttataagggattttgccgatttcggcctattggttaaaaaatgagctgatttaacaaaaatttaacgcgaattttaacaaaatattaacgtttacaatttcaggtggcacttttcggggaaatgtgcgcggaacccctatttgtttatttttctaaatacattcaaatatgtatccgctcatgaattaattcttagaaaaactcatcgagcatcaaatgaaactgcaatttattcatatcaggattatcaataccatatttttgaaaaagccgtttctgtaatgaaggagaaaactcaccgaggcagttccataggatggcaagatcctggtatcggtctgcgattccgactcgtccaacatcaatacaacctattaatttcccctcgtcaaaaataaggttatcaagtgagaaatcaccatgagtgacgactgaatccggtgagaatggcaaaagtttatgcatttctttccagacttgttcaacaggccagccattacgctcgtcatcaaaatcactcgcatcaaccaaaccgttattcattcgtgattgcgcctgagcgagacgaaatacgcgatcgctgttaaaaggacaattacaaacaggaatcgaatgcaaccggcgcaggaacactgccagcgcatcaacaatattttcacctgaatcaggatattcttctaatacctggaatgctgttttcccggggatcgcagtggtgagtaaccatgcatcatcaggagtacggataaaatgcttgatggtcggaagaggcataaattccgtcagccagtttagtctgaccatctcatctgtaacatcattggcaacgctacctttgccatgtttcagaaacaactctggcgcatcgggcttcccatacaatcgatagattgtcgcacctgattgcccgacattatcgcgagcccatttatacccatataaatcagcatccatgttggaatttaatcgcggcctagagcaagacgtttcccgttgaatatggctcataacaccccttgtattactgtttatgtaagcagacagttttattgttcatgaccaaaatcccttaacgtgagttttcgttccactgagcgtcagaccccgtagaaaagatcaaaggatcttcttgagatcctttttttctgcgcgtaatctgctgcttgcaaacaaaaaaaccaccgctaccagcggtggtttgtttgccggatcaagagctaccaactctttttccgaaggtaactggcttcagcagagcgcagataccaaatactgtccttctagtgtagccgtagttaggccaccacttcaagaactctgtagcaccgcctacatacctcgctctgctaatcctgttaccagtggctgctgccagtggcgataagtcgtgtcttaccgggttggactcaagacgatagttaccggataaggcgcagcggtcgggctgaacggggggttcgtgcacacagcccagcttggagcgaacgacctacaccgaactgagatacctacagcgtgagctatgagaaagcgccacgcttcccgaagggagaaaggcggacaggtatccggtaagcggcagggtcggaacaggagagcgcacgagggagcttccagggggaaacgcctggtatctttatagtcctgtcgggtttcgccacctctgacttgagcgtcgatttttgtgatgctcgtcaggggggcggagcctatggaaaaacgccagcaacgcggcctttttacggttcctggccttttgctggccttttgctcacatgttctttcctgcgttatcccctgattctgtggataaccgtattaccgcctttgagtgagctgataccgctcgccgcagccgaacgaccgagcgcagcgagtcagtgagcgaggaagcggaagagcgcctgatgcggtattttctccttacgcatctgtgcggtatttcacaccgcatatatggtgcactctcagtacaatctgctctgatgccgcatagttaagccagtatacactccgctatcgctacgtgactgggtcatggctgcgccccgacacccgccaacacccgctgacgcgccctgacgggcttgtctgctcccggcatccgcttacagacaagctgtgaccgtctccgggagctgcatgtgtcagaggttttcaccgtcatcaccgaaacgcgcgaggcagctgcggtaaagctcatcagcgtggtcgtgaagcgattcacagatgtctgcctgttcatccgcgtccagctcgttgagtttctccagaagcgttaatgtctggcttctgataaagcgggccatgttaagggcggttttttcctgtttggtcactgatgcctccgtgtaagggggatttctgttcatgggggtaatgataccgatgaaacgagagaggatgctcacgatacgggttactgatgatgaacatgcccggttactggaacgttgtgagggtaaacaactggcggtatggatgcggcgggaccagagaaaaatcactcagggtcaatgccagcgcttcgttaatacagatgtaggtgttccacagggtagccagcagcatcctgcgatgcagatccggaacataatggtgcagggcgctgacttccgcgtttccagactttacgaaacacggaaaccgaagaccattcatgttgttgctcaggtcgcagacgttttgcagcagcagtcgcttcacgttcgctcgcgtatcggtgattcattctgctaaccagtaaggcaaccccgccagcctagccgggtcctcaacgacaggagcacgatcatgcgcacccgtggggccgccatgccggcgataatggcctgcttctcgccgaaacgtttggtggcgggaccagtgacgaaggcttgagcgagggcgtgcaagattccgaataccgcaagcgacaggccgatcatcgtcgcgctccagcgaaagcggtcctcgccgaaaatgacccagagcgctgccggcacctgtcctacgagttgcatgataaagaagacagtcataagtgcggcgacgatagtcatgccccgcgcccaccggaaggagctgactgggttgaaggctctcaagggcatcggtcgagatcccggtgcctaatgagtgagctaacttacattaattgcgttgcgctcactgcccgctttccagtcgggaaacctgtcgtgccagctgcattaatgaatcggccaacgcgcggggagaggcggtttgcgtattgggcgccagggtggtttttcttttcaccagtgagacgggcaacagctgattgcccttcaccgcctggccctgagagagttgcagcaagcggtccacgctggtttgccccagcaggcgaaaatcctgtttgatggtggttaacggcgggatataacatgagctgtcttcggtatcgtcgtatcccactaccgagatatccgcaccaacgcgcagcccggactcggtaatggcgcgcattgcgcccagcgccatctgatcgttggcaaccagcatcgcagtgggaacgatgccctcattcagcatttgcatggtttgttgaaaaccggacatggcactccagtcgccttcccgttccgctatcggctgaatttgattgcgagtgagatatttatgccagccagccagacgcagacgcgccgagacagaacttaatgggcccgctaacagcgcgatttgctggtgacccaatgcgaccagatgctccacgcccagtcgcgtaccgtcttcatgggagaaaataatactgttgatgggtgtctggtcagagacatcaagaaataacgccggaacattagtgcaggcagcttccacagcaatggcatcctggtcatccagcggatagttaatgatcagcccactgacgcgttgcgcgagaagattgtgcaccgccgctttacaggcttcgacgccgcttcgttctaccatcgacaccaccacgctggcacccagttgatcggcgcgagatttaatcgccgcgacaatttgcgacggcgcgtgcagggccagactggaggtggcaacgccaatcagcaacgactgtttgcccgccagttgttgtgccacgcggttgggaatgtaattcagctccgccatcgccgcttccactttttcccgcgttttcgcagaaacgtggctggcctggttcaccacgcgggaaacggtctgataagagacaccggcatactctgcgacatcgtataacgttactggtttcacattcaccaccctgaattgactctcttccgggcgctatcatgccataccgcgaaaggttttgcgccattcgatggtgtccgggatctcgacgctctcccttatgcgactcctgcattaggaagcagcccagtagtaggttgaggccgttgagcaccgccgccgcaaggaatggtgcatgcaaggagatggcgcccaacagtcccccggccacggggcctgccaccatacccacgccgaaacaagcgctcatgagcccgaagtggcgagcccgatcttccccatcggtgatgtcggcgatataggcgccagcaaccgcacctgtggcgccggtgatgccggccacgatgcgtccggcgtagaggatcgagatctcgatcccgcgaaattaatacgactcactataggggaattgtgagcggataacaattcccctctagaaataattttgtttaactttaagaaggagatataccatgggcagcagccatcatcatcatcatcacagcagcggcctggtgccgcgcggcagccatatggctagtatggatctggatgcagtaaggattaaagtggacacagtaaatgcaaaaccgggagacacagtaaatatacctgtaagattcagtggtataccatccaagggaatagcaaactgtgactttgtatacagctatgacccgaatgtacttgagataatagagataaaaccgggagaattgatagttgacccgaatcctaccaagagctttgatactgcagtatatcctgacagaaagatgatagtattcctgtttgcggaagacagcggaacaggagcgtatgcaataactaaagacggagtatttgctacgatagtagcgaaagtaaaagaaggagcacctaacgggctcagtgtaatcaaatttgtagaagtaggcggatttgcgaacaatgaccttgtagaacagaagacacagttctttgacggtggagtaaatgttggagatacaacagaacctgcaacacctacaacacctgtaacaacaccgacaacaacagatgatctagatgcagctagcacggccgcgtccgataacttccagctgtcccagggtgggcagggattcgccattccgatcgggcaggcgatggcgatcgcgggccagatccgatcgggtggggggtcacccaccgttcatatcgggcctaccgccttcctcggcttgggtgttgtcgacaacaacggcaacggcgcacgagtccaacgcgtggtcgggagcgctccggcggcaagtctcggcatctccaccggcgacgtgatcaccgcggtcgacggcgctccgatcaactcggccaccgcgatggcggacgcgcttaacgggcatcatcccggtgacgtcatctcggtgacctggcaaaccaagtcgggcggcacgcgtacagggaacgtgacattggccgagggacccccggccgaattcatggtggatttcggggcgttaccaccggagatcaactccgcgaggatgtacgccggcccgggttcggcctcgctggtggccgcggctcagatgtgggacagcgtggcgagtgacctgttttcggccgcgtcggcgtttcagtcggtggtctggggtctgacggtggggtcgtggataggttcgtcggcgggtctgatggtggcggcggcctcgccgtatgtggcgtggatgagcgtcaccgcggggcaggccgagctgaccgccgcccaggtccgggttgctgcggcggcctacgagacggcgtatgggctgacggtgcccccgccggtgatcgccgagaaccgtgctgaactgatgattctgatagcgaccaacctcttggggcaaaacaccccggcgatcgcggtcaacgaggccgaatacggcgagatgtgggcccaagacgccgccgcgatgtttggctacgccgcggcgacggcgacggcgacggcgacgttgctgccgttcgaggaggcgccggagatgaccagcgcgggtgggctcctcgagcaggccgccgcggtcgaggaggcctccgacaccgccgcggcgaaccagttgatgaacaatgtgccccaggcgctgcaacagctggcccagcccacgcagggcaccacgccttcttccaagctgggtggcctgtggaagacggtctcgccgcatcggtcgccgatcagcaacatggtgtcgatggccaacaaccacatgtcgatgaccaactcgggtgtgtcgatgaccaacaccttgagctcgatgttgaagggctttgctccggcggcggccgcccaggccgtgcaaaccgcggcgcaaaacggggtccgggcgatgagctcgctgggcagctcgctgggttcttcgggtctgggcggtggggtggccgccaacttgggtcgggcggcctcggtcggttcgttgtcggtgccgcaggcctgggccgcggccaaccaggcagtcaccccggcggcgcgggcgctgccgctgaccagcctgaccagcgccgcggaaagagggcccgggcagatgctgggcgggctgccggtggggcagatgggcgccagggccggtggtgggctcagtggtgtgctgcgtgttccgccgcgaccctatgtgatgccgcattctccggcggccggcgatatcgccccgccggccttgtcgcaggaccggttcgccgacttccccgcgctgcccctcgacccgtccgcgatggtcgcccaagtggggccacaggtggtcaacatcaacaccaaactgggctacaacaacgccgtgggcgccgggaccggcatcgtcatcgatcccaacggtgtcgtgctgaccaacaaccacgtgatcgcgggcgccaccgacatcaatgcgttcagcgtcggctccggccaaacctacggcgtcgatgtggtcgggtatgaccgcacccaggatgtcgcggtgctgcagctgcgcggtgccggtggcctgccgtcggcggcgatcggtggcggcgtcgcggttggtgagcccgtcgtcgcgatgggcaacagcggtgggcagggcggaacgccccgtgcggtgcctggcagggtggtcgcgctcggccaaaccgtgcaggcgtcggattcgctgaccggtgccgaagagacattgaacgggttgatccagttcgatgccgcgatccagcccggtgattcgggcgggcccgtcgtcaacggcctaggacaggtggtcggtatgaacacggccgcgtcctagaagcttgcggccgcactcgagcaccaccaccaccaccactgagatccggctgctaacaaagcccgaaaggaagctgagttggctgctgccaccgctgagcaataactagcataaccccttggggcctctaaacgggtcttgaggggttttttgctgaaaggaggaactatatccggat

SEQ ID NO: 219 - protein, 917 aa, Artificial Sequence
  Description of Artificial Sequence: Synthetic polypeptide
MGSSHHHHHHSSGLVPRGSHMASMDLDAVRIKVDTVNAKPGDTVNIPVRFSGIPSKGIANCDFVYSYDPNVLEIIEIKPGELIVDPNPTKSFDTAVYPDRKMIVFLFAEDSGTGAYAITKDGVFATIVAKVKEGAPNGLSVIKFVEVGGFANNDLVEQKTQFFDGGVNVGDTTEPATPTTPVTTPTTTDDLDAASTAASDNFQLSQGGQGFAIPIGQAMAIAGQIRSGGGSPTVHIGPTAFLGLGVVDNNGNGARVQRVVGSAPAASLGISTGDVITAVDGAPINSATAMADALNGHHPGDVISVTWQTKSGGTRTGNVTLAEGPPAEFMVDFGALPPEINSARMYAGPGSASLVAAAQMWDSVASDLFSAASAFQSVVWGLTVGSWIGSSAGLMVAAASPYVAWMSVTAGQAELTAAQVRVAAAAYETAYGLTVPPPVIAENRAELMILIATNLLGQNTPAIAVNEAEYGEMWAQDAAAMFGYAAATATATATLLPFEEAPEMTSAGGLLEQAAAVEEASDTAAANQLMNNVPQALQQLAQPTQGTTPSSKLGGLWKTVSPHRSPISNMVSMANNHMSMTNSGVSMTNTLSSMLKGFAPAAAAQAVQTAAQNGVRAMSSLGSSLGSSGLGGGVAANLGRAASVGSLSVPQAWAAANQAVTPAARALPLTSLTSAAERGPGQMLGGLPVGQMGARAGGGLSGVLRVPPRPYVMPHSPAAGDIAPPALSQDRFADFPALPLDPSAMVAQVGPQVVNINTKLGYNNAVGAGTGIVIDPNGVVLTNNHVIAGATDINAFSVGSGQTYGVDVVGYDRTQDVAVLQLRGAGGLPSAAIGGGVAVGEPVVAMGNSGGQGGTPRAVPGRVVALGQTVQASDSLTGAEETLNGLIQFDAAIQPGDSGGPVVNGLGQVVGMNTAAS

SEQ ID NO: 220 - DNA, 6577 bp, Artificial Sequence
  Description of Artificial Sequence: Synthetic polynucleotide
tggcgaatgggacgcgccctgtagcggcgcattaagcgcggcgggtgtggtggttacgcgcagcgtgaccgctacacttgccagcgccctagcgcccgctcctttcgctttcttcccttcctttctcgccacgttcgccggctttccccgtcaagctctaaatcgggggctccctttagggttccgatttagtgctttacggcacctcgaccccaaaaaacttgattagggtgatggttcacgtagtgggccatcgccctgatagacggtttttcgccctttgacgttggagtccacgttctttaatagtggactcttgttccaaactggaacaacactcaaccctatctcggtctattcttttgatttataagggattttgccgatttcggcctattggttaaaaaatgagctgatttaacaaaaatttaacgcgaattttaacaaaatattaacgtttacaatttcaggtggcacttttcggggaaatgtgcgcggaacccctatttgtttatttttctaaatacattcaaatatgtatccgctcatgaattaattcttagaaaaactcatcgagcatcaaatgaaactgcaatttattcatatcaggattatcaataccatatttttgaaaaagccgtttctgtaatgaaggagaaaactcaccgaggcagttccataggatggcaagatcctggtatcggtctgcgattccgactcgtccaacatcaatacaacctattaatttcccctcgtcaaaaataaggttatcaagtgagaaatcaccatgagtgacgactgaatccggtgagaatggcaaaagtttatgcatttctttccagacttgttcaacaggccagccattacgctcgtcatcaaaatcactcgcatcaaccaaaccgttattcattcgtgattgcgcctgagcgagacgaaatacgcgatcgctgttaaaaggacaattacaaacaggaatcgaatgcaaccggcgcaggaacactgccagcgcatcaacaatattttcacctgaatcaggatattcttctaatacctggaatgctgttttcccggggatcgcagtggtgagtaaccatgcatcatcaggagtacggataaaatgcttgatggtcggaagaggcataaattccgtcagccagtttagtctgaccatctcatctgtaacatcattggcaacgctacctttgccatgtttcagaaacaactctggcgcatcgggcttcccatacaatcgatagattgtcgcacctgattgcccgacattatcgcgagcccatttatacccatataaatcagcatccatgttggaatttaatcgcggcctagagcaagacgtttcccgttgaatatggctcataacaccccttgtattactgtttatgtaagcagacagttttattgttcatgaccaaaatcccttaacgtgagttttcgttccactgagcgtcagaccccgtagaaaagatcaaaggatcttcttgagatcctttttttctgcgcgtaatctgctgcttgcaaacaaaaaaaccaccgctaccagcggtggtttgtttgccggatcaagagctaccaactctttttccgaaggtaactggcttcagcagagcgcagataccaaatactgtccttctagtgtagccgtagttaggccaccacttcaagaactctgtagcaccgcctacatacctcgctctgctaatcctgttaccagtggctgctgccagtggcgataagtcgtgtcttaccgggttggactcaagacgatagttaccggataaggcgcagcggtcgggctgaacggggggttcgtgcacacagcccagcttggagcgaacgacctacaccgaactgagatacctacagcgtgagctatgagaaagcgccacgcttcccgaagggagaaaggcggacaggtatccggtaagcggcagggtcggaacaggagagcgcacgagggagcttccagggggaaacgcctggtatctttatagtcctgtcgggtttcgccacctctgacttgagcgtcgatttttgtgatgctcgtcaggggggcggagcctatggaaaaacgccagcaacgcggcctttttacggttcctggccttttgctggccttttgctcacatgttctttcctgcgttatcccctgattctgtggataaccgtattaccgcctttgagtgagctgataccgctcgccgcagccgaacgaccgagcgcagcgagtcagtgagcgaggaagcggaagagcgcctgatgcggtattttctccttacgcatctgtgcggtatttcacaccgcatatatggtgcactctcagtacaatctgctctgatgccgcatagttaagccagtatacactccgctatcgctacgtgactgggtcatggctgcgccccgacacccgccaacacccgctgacgcgccctgacgggcttgtctgctcccggcatccgcttacagacaagctgtgaccgtctccgggagctgcatgtgtcagaggttttcaccgtcatcaccgaaacgcgcgaggcagctgcggtaaagctcatcagcgtggtcgtgaagcgattcacagatgtctgcctgttcatccgcgtccagctcgttgagtttctccagaagcgttaatgtctggcttctgataaagcgggccatgttaagggcggttttttcctgtttggtcactgatgcctccgtgtaagggggatttctgttcatgggggtaatgataccgatgaaacgagagaggatgctcacgatacgggttactgatgatgaacatgcccggttactggaacgttgtgagggtaaacaactggcggtatggatgcggcgggaccagagaaaaatcactcagggtcaatgccagcgcttcgttaatacagatgtaggtgttccacagggtagccagcagcatcctgcgatgcagatccggaacataatggtgcagggcgctgacttccgcgtttccagactttacgaaacacggaaaccgaagaccattcatgttgttgctcaggtcgcagacgttttgcagcagcagtcgcttcacgttcgctcgcgtatcggtgattcattctgctaaccagtaaggcaaccccgccagcctagccgggtcctcaacgacaggagcacgatcatgcgcacccgtggggccgccatgccggcgataatggcctgcttctcgccgaaacgtttggtggcgggaccagtgacgaaggcttgagcgagggcgtgcaagattccgaataccgcaagcgacaggccgatcatcgtcgcgctccagcgaaagcggtcctcgccgaaaatgacccagagcgctgccggcacctgtcctacgagttgcatgataaagaagacagtcataagtgcggcgacgatagtcatgccccgcgcccaccggaaggagctgactgggttgaaggctctcaagggcatcggtcgagatcccggtgcctaatgagtgagctaacttacattaattgcgttgcgctcactgcccgctttccagtcgggaaacctgtcgtgccagctgcattaatgaatcggccaacgcgcggggagaggcggtttgcgtattgggcgccagggtggtttttcttttcaccagtgagacgggcaacagctgattgcccttcaccgcctggccctgagagagttgcagcaagcggtccacgctggtttgccccagcaggcgaaaatcctgtttgatggtggttaacggcgggatataacatgagctgtcttcggtatcgtcgtatcccactaccgagatatccgcaccaacgcgcagcccggactcggtaatggcgcgcattgcgcccagcgccatctgatcgttggcaaccagcatcgcagtgggaacgatgccctcattcagcatttgcatggtttgttgaaaaccggacatggcactccagtcgccttcccgttccgctatcggctgaatttgattgcgagtgagatatttatgccagccagccagacgcagacgcgccgagacagaacttaatgggcccgctaacagcgcgatttgctggtgacccaatgcgaccagatgctccacgcccagtcgcgtaccgtcttcatgggagaaaataatactgttgatgggtgtctggtcagagacatcaagaaataacgccggaacattagtgcaggcagcttccacagcaatggcatcctggtcatccagcggatagttaatgatcagcccactgacgcgttgcgcgagaagattgtgcaccgccgctttacaggcttcgacgccgcttcgttctaccatcgacaccaccacgctggcacccagttgatcggcgcgagatttaatcgccgcgacaatttgcgacggcgcgtgcagggccagactggaggtggcaacgccaatcagcaacgactgtttgcccgccagttgttgtgccacgcggttgggaatgtaattcagctccgccatcgccgcttccactttttcccgcgttttcgcagaaacgtggctggcctggttcaccacgcgggaaacggtctgataagagacaccggcatactctgcgacatcgtataacgttactggtttcacattcaccaccctgaattgactctcttccgggcgctatcatgccataccgcgaaaggttttgcgccattcgatggtgtccgggatctcgacgctctcccttatgcgactcctgcattaggaagcagcccagtagtaggttgaggccgttgagcaccgccgccgcaaggaatggtgcatgcaaggagatggcgcccaacagtcccccggccacggggcctgccaccatacccacgccgaaacaagcgctcatgagcccgaagtggcgagcccgatcttccccatcggtgatgtcggcgatataggcgccagcaaccgcacctgtggcgccggtgatgccggccacgatgcgtccggcgtagaggatcgagatctcgatcccgcgaaattaatacgactcactataggggaattgtgagcggataacaattcccctctagaaataattttgtttaactttaagaaggagatataccatgggcagcagccatcatcatcatcatcacagcagcggcctggtgccgcgcggcagccatatggctagtatggatctggatgcagtaaggattaaagtggacacagtaaatgcaaaaccgggagacacagtaaatatacctgtaagattcagtggtataccatccaagggaatagcaaactgtgactttgtatacagctatgacccgaatgtacttgagataatagagataaaaccgggagaattgatagttgacccgaatcctaccaagagctttgatactgcagtatatcctgacagaaagatgatagtattcctgtttgcggaagacagcggaacaggagcgtatgcaataactaaagacggagtatttgctacgatagtagcgaaagtaaaagaaggagcacctaacgggctcagtgtaatcaaatttgtagaagtaggcggatttgcgaacaatgaccttgtagaacagaagacacagttctttgacggtggagtaaatgttggagatacaacagaacctgcaacacctacaacacctgtaacaacaccgacaacaacagatgatctagatgcagctagcatgcggacccccagacgccactgccgtcgcatcgccgtcctcgccgccgttagcatcgccgccactgtcgttgccggctgctcgtcgggctcgaagccaagcggcggaccacttccggacgcgaagccgctggtcgaggaggccaccgcgcagaccaaggctctcaagagcgcgcacatggtgctgacggtcaacggcaagatcccgggactgtctctgaagacgctgagcggcgatctcaccaccaaccccaccgccgcgacgggaaacgtcaagctcacgctgggtgggtctgatatcgatgccgacttcgtggtgttcgacgggatcctgtacgccaccctgacgcccaaccagtggagcgatttcggtcccgccgccgacatctacgaccccgcccaggtgctgaatccggataccggcctggccaacgtgctggcgaatttcgccgacgcaaaagccgaagggcgggataccatcaacggccagaacaccatccgcatcagcgggaaggtatcggcacaggcggtgaaccagatagcgccgccgttcaacgcgacgcagccggtgccggcgaccgtctggattcaggagaccggcgatcatcaactggcacaggcccagttggaccgcggctcgggcaattccgtccagatgaccttgtcgaaatggggcgagaaggtccaggtcacgaagcccccggtgagcctgcctgagactggtgaagcacatcaccatcaccatcactgagcggccgcactcgagcaccaccaccaccaccactgagatccggctgctaacaaagcccgaaaggaagctgagttggctgctgccaccgctgagcaataactagcataaccccttggggcctctaaacgggtcttgaggggttttttgctgaaaggaggaactatatccggat

SEQ ID NO: 221 - protein, 444 aa, Artificial Sequence
  Description of Artificial Sequence: Synthetic polypeptide
MGSSHHHHHHSSGLVPRGSHMASMDLDAVRIKVDTVNAKPGDTVNIPVRFSGIPSKGIANCDFVYSYDPNVLEIIEIKPGELIVDPNPTKSFDTAVYPDRKMIVFLFAEDSGTGAYAITKDGVFATIVAKVKEGAPNGLSVIKFVEVGGFANNDLVEQKTQFFDGGVNVGDTTEPATPTTPVTTPTTTDDLDAASMRTPRRHCRRIAVLAAVSIAATVVAGCSSGSKPSGGPLPDAKPLVEEATAQTKALKSAHMVLTVNGKIPGLSLKTLSGDLTTNPTAATGNVKLTLGGSDIDADFVVFDGILYATLTPNQWSDFGPAADIYDPAQVLNPDTGLANVLANFADAKAEGRDTINGQNTIRISGKVSAQAVNQIAPPFNATQPVPATVWIQETGDHQLAQAQLDRGSGNSVQMTLSKWGEKVQVTKPPVSLPETGEAHHHHHH
